United States Patent Application Publication US 2026/0258423 A1 - sequence listing, part 32

SEQ ID NO: 167803 - DNA, 46709983 bp, Homo sapiens (residues 41,705,351-43,373,564 of 46,709,983)
  source 1..46709983: mol_type = genomic DNA
cttcaacaagtttggtgacaagggaagaggacaaagtgggactgtgctagcgaagcatgttgatgagaggagtttttaagggtggaaagttctgagcagccatgagggtggaggaggaggtcagtgacgaaaatgctgtatgtgaattgtatccacaaatgatatgtcccagtcctaaacccggtgcctgtgaatgagaccttatatggaaagagggtcttagaaacgaatcaagttaagatgcggtcatgatgggttagggtgggccctaagtcccataacactggtgtccctgtaggagggaagtttggacacagacctgagtagagggaggatgaagtgaggaggcacacagaagcgggcgggccaaggccaacgtggggatgtagtgatgcagccaccagccacggaagcccaggaccacgggccactgacagacatgggagagacgcaaggaactgtccttccccagagccttcagacggaacacagccccacacacaccttgatttcagatgtctggtctccagaaccatgagaaaaaaaaatctgttgttgaattcacccagtttgtaaaatttgtggcaccagccatgggacactcatgcagagggtgacctgcttggctccaatttctcagagttgggcacaaaatcagccacaaccctgtggttgtgtctgttctgagcacagggatgcagcccaccccttcctttccgcactcttccctgggacagcagggatctgaggaattcctctaggggcctggctgcaggaggtccccgctccaaagcccaaaggaggcaggtgggagtaagtgaacaggacgggaaacgccgagcaggaacctgcatagtacgggggagcccccaggcctgcctaccgtctcaacaccagcatttggattccactaggaaggaaaacaagaagactgaaaaagacagagaggagcaggagagtgtgcaagggacagtctctgtcttccacattggctgtttgccagagcatggcctgttggcacccctcgcttgttcataggtggctgacaacatagccataaatccacctgtgccagtccatgaatggacaaagggcgagagatgaccctgcttcagccacagaggccagtgctcagactccagccagctggaggcccccaggcaggcgaatgggcttgggtttctaagaccaacacagaaatgcccaggtacactgtgctgcttttctctggagaagagagaacgtccctttcaccaagttattatttcttccttttaaaatttgattgttataacattgttttaatagtcaagtagtgctgcaaggcttgtgataataaacagttgttatcactgcacctcttcccacctccagctccctcccctgtgagtcatcggccttcaagtctctcagctgtttctcttgaccttgaccttcacacttccaacatgattacagtactattcctttcggttttatctcacttacaccaccacctcccacacactcccacctattccacctacccagcatcttcacaacttacacagttacacaattcgcaacctttggccaagtcaatatttagttctgatattactatgaccaccataaatgttgtcacaactaaaccacttagggaactaggatggtcttttctttttagtacaactttttgattttcctggggttaacaattgcctcattttttcataaacttaatttttttgtctactacttaccaattatcccccccccaattttctgatagacctataaaagtcctctcaacaaagtcaaacatactaagtaatcattcttttgttgttgctttgttgttgtttgtccttccccttggagacatcccctccagagctctctgtcctatttgtatctgggctggctgacctcttggcttgtggcacagctcccccttgaaagttcccttcaacttcagtgagaattccttcgtatttttctggtgctaaatctaatgtgtcctgtgcctcacatctttctcttttggggtttacttccttgtgcaagtgacacccataccacaggaacttgctgagaaagaatgcatgtgaggttcaatgatttcatcttgcataccttcaaacatctttgttctacccttacatttgatttttcatttattatttgaaaatgtggcttgccttttcagtaaggaaattcatgtcctgcaggtcggtattgttttgttttgtcttttggcatctttctcctctttctgctcgctctgagtgccaactccagagctggtctggctcaatttctctatagtgtgcacttcctgagttctcttcagtgaggtggatgagtcatctagccaggtggataacgaggaagtctcagggactaagtgtctctgacaatacattcagccactactacagtatgaagccagcccctcatccccaccttcagagacccctggtgcctcagattcctcggccattctggagctgctgtgcccgaggcttgtgtagttggagatcattttggcagtcagtgctgcttcagctttcactgttctgctgtgccagcacatcaccagggatcacctttggctgcatgaaccagaaccccattccagggctcaaccaaacagcactttaattttcttacccaagcaagcagtcctggcttgtacagcctccccaggatgtcaccaggaccccaagctccttctatcttgctgctctgccatcctgtgtcactttcttcctcatggaggcttcctggtcacaggacacccactccacctccagtctcttgttcacaatccaaggagatggaaggaaagaaatgatgaggaaccagggtggctgcaatgtcagcaacagtatttcccaggatctctagcagattttttttggggggtggtttgtttgtttgtttgttggggttttttgttttgttttgttttgtgacagaggcagggtctcactctgtcacccaggctggctggagtgcaatggtgcaatcctggctcactgcagcctcgacctcccaggctcaagcaatcctcccatctcagcctcctgagtagctgggactgcagacacgcaccaccaaacctggctaaatttgtttatttttttatagagacaggtttcactatgttgcccaggctggtcttgaactccttggctcaagcaatccaagctggtgagaacgtggagccagtgaagctcacacaagtcaccaacgagaatgcaagatgcaatagccactttggaaaataggtgggcagtttcttataaagttaaacagatacttaatgaatgacccagcaatcctaatcctggatatttacccaaaaagtaaaaactagtgatcagggcaggcacagtggctcacgcctgtaatcccagcactttgggaagctgaggtgggcggatctcttgaggtcaggagttcaagaccagcctggccaatgtggcaaaaccccgactctactaaaaatacaaaaattagccgggtgtggtggtgtacacctgtagtcacagctactcgggaggctgagagaggaaaattgcttgaacctaggaggcggaggttgcagtgagccaagatcatgccatagcaccccagcctgggcaacagagcaagactctgtctcaaaaacataaacaaaacaaaaacaaacacaaacaaacaaagcctagagatcacagaaaaacctggagacaaatgtttctggctgctcattcataatcgttccaaactggagacaacccaaatatccatcagctgggacgtggataagcaaactgtggggaaccctaacagcagatattattgttcagcaacaaaaaggaaccatctactgacacttacagcgacatggatgaatctcagacgtgttacgctgagtgaaagatgccagacaccaaaagccacacgctgagatcccatggagaggacattctggaaaaggcaaaactgtagagacagggaacaaattggtggttgcaggggctgagagtgggagctgggaactggctgccaaggagtgtgggggtggtttgggggtgatatagatgtggtctatgtttggctatggtggtggttacacaactgtgaccacttcgtcaaactcatagaactttgtcaaaactcgtagaactgtacactaaaacaatgagttttaccgtatgttgattatataactctatcttttttttttaatagggtctcattctattgcttgtcacccagctcaagcaatcctcccaccccagacttcctggtagctaggacctacaggcgtgtgccactatgcccagctagttttaatttttttgtagagatgaggtcttgctatgttgtccagactggtctcaaactcctggcctcaaatgatcctctcacctcagcctcctaaattgctggaattacaggcatgagccacctcgccagcctatatctcaataagcctgacttttaaaaggtttcaggctggatgcagtggctcacaagaccagcctgcacaacatggggagaccccatatccagaaaatgtttttaaactattagccgggcgtggtggtatgcacctgtagacccagctactggagaggctaaggcaagaggatcacatgagcccagggttttcaggccacagtgagccatgatcatgcaactacactccagcctggatgacagagcaagaccccatctctaaaaaataaagggaaaataaaattgtaaaaggtttcaatcaacaaacttgtggaatactgaataccacaccgctatttattgacaccctgatcatgtgggtttagtcaaggccctgaaaagtcctgcagttcatttaaccaagagtattatccttcaagcttttttccaagtgacaacaaaaaggaaccatcttgatgtactggcaagcatcaagcaagatgatctggaatgtctccctccgcacaaatagtctgtgactgtaaagtggtttgggccaatggcctccctgaaggaggctctgggaagtgggaatcagaccttgtgtttaggtttctttgcggagagccgcctcctctcctcgttcacgtgctgactcaggtcttctccagcccaggaaacatggagggagggagcagaccacatgtatgtccacacccttagaaaacagtggctcccacaaagggagagaggctgagccccagtcctgtggatggttgctgcccagccctgggaggctggtggcagacacgccctgggaggctggtggcagccaagggaccagaccctctcagcccgtggccccgccatcaaggctgtcactggtgtgtcacttcctcatgggctaagcactgctcatccatttctagtttggccttcacaagtgccccttgaggcagtgtggcgtcatgtccatgtgtcatgacatgtggcaaagccgctcaccaccgaccaacaggcctcccaggagtcaggagtccagtaccagatggggcagaaccatccttcccaaggtctgggccatctgtccttcgagtccgagcagcgcagggcccaaaccctcgagtcacttcccatttccacacccttccaggtgtttagggagacagctacaactcagcccccggggaagcactcaccaggaactccagcaggaaaggagggcggccagccagcgtgtgggtgccttctcctccagctccactagcagcaaatcatgctggccttgtccctccctctgcctcacccccagcctcctgctgcccggtccagatgctaaaaatagccccaacctgcattcagaatccagcacatcataccttccacagcaggcatctgcaccgttgacagtggaggccactgtgactccaccacctccccaacacagccttccaccagccatggcagagggagcttgcaaaaccagagggtgggtgcaagaactcacgccctctccaaacgctttccagaggtaggccaggcggccaatggttgcacctgaggcccaggagaggaactgacctcactggctttgtaaacgccatgatattcaagttctcacgtttcctatttctgagcaagccaaatcaatgtcaacatacatgaaatacatctatgaatgtggtctacaaagagattctttattttgcaagacaagtccatagcaagcaaatcttttgagtcctgaaaatatattgtttttcaaaattccgagtgacgtgcaactatttcataaactggagcacatgatcgggtgtactattaccccttcctctaggtggtatttcaaagggtacgtatttcccccacccttcatgaattaactccttgttttactttcctagggcggcagtcacaagataccacagactgggtggctgaaaacacagaaatgcgttctttggcagttctggaagctatcatggaatcctgaaatcaaggtgtgtcccggatgtctccagggagaaccgttccaggcctctccctgctcctggtgtcagctggcactgccaggcttcctggcctctccctgctcctggtgtcagctggcactgccaggcgtccctcggcttgtaagggcgtcactcccgttgcaggccgtcttctccttgcccctttacttcaccttccctcagtgtgtgtctatgtctgtatccaaatttctcctttttgaaaggacaccagtcatgctgcactagggtccctgctaatgacctcattttaatcagttactctgtaaaggtcttatctccaagcacggtcacattctaggggactgggaatcaggaccccaacatacctgttttggggggacacaattcaaccctaacactcccattttctaatagaagaggagaggggagggaaggagggaagggggaaggggccggagacctcggcaggagggagggagaagccagcctgccgccctgcgcgcaccggctgtgtttctgtgcgttgtgcttttgttctgcatgctgggcgggcggaacagggtgctggcatccaggctcacccagaggggagggggacctgcagggggaggggagcactcaggggatcaggggaggagagtgtgggccaggtgacctgccaggcgagagaaaatcggggaatccgcacagcattttcagacagcctgacagcagccgctcgctcccctctgagccccagcccccagcaagcgggcctctggccccaggtctgggagcggcgtggaagtagaccttggctctccctccccggcagcaccccacctccctttgtctctccagccagaggtgggcctgtggggatgctaatctcagagccacctctccatctaaggttgctagaaattcggcaaacaaaagatagatttagagaacaaaaaaatttaaaaaaaataatatggccggttaaatgtgagtttcaatttccaataaataaatgttgcctgggatatgcttatatcaaaaacttacgtgtcacttacctagcatttgcatttcactgggcctcctaaattctgtgtggtaaccgactgccaccggacatgctgtttacttctctatcctcacgcagccagttgccacattcaacataacactgcaaatattgccggtggatcctgacttcctcgtggaccctactgtgtcgggaaaaacaaacaaacgaaccctggaaggaaacaccatgagttgttagtagtgcctgtctctgaatgatgggcttacaggtggttttcaattttttgtctttaatttttttttttttttttagactgagtctcactctgttgcccaggctggaatgcagtggcatgatcttagctcactgcaacctctgccacccgggttcaagcgattcccctgcctcagcctcccaagcaactgggattacagacattcgccatcatgcccagctaatttttgtgtttttggtagagatggtgttttgccatgttggccaggctggtcttgaactcctgacctcaggagatctgcctgctttgggcacccaaagtgctaggattataggcgtgagccacagcacctggcttgtctttaattttttgtttatacttttctataccttctaattgttttcaaccaacacgtatatcccagaaaatgttttaatgattaaaataaaacaattgccctctcctccttggagccccatccacaagagcagcttctgcagatgtgggaaggagaagactttgtacctgggtcccaggccacgtgaataattaaccctgtctagggagccttggaggtctgatgaggccagggcttgaaggagagccgcggagcacgccaggatccaggcttgtgggtagcagcatccctggaaatggtccccagtgggggaggaaccagtagccatcacctccaacccccagccaccgccccgcgccatgtgagtgaggtggcatctggttttccacacacacctccccatgtcgctggacgcaggcaaggccacccaacccccaagccagagtcacccggacagacggatactaggcaccttagcacttccatggccagaggcctcctgaggtgggaaccgggtcctagcccatcccaggccatcccctccaggaccttcctggaggagcggggagaccagacttagaggaaggctccatgtcccaggtccagacaggggtgagggggaagaggggtgagcacctgtgttaggcactttgaactctccaggtcaggtgactgcatccagctgagactcctggcctccctccagcgtggaatgagcagccggtcctgtcccgtccacccctccagtgctgcggaacagaacgggaatggcaagtccccatgtgctgtctccccgcccttctacagcaccggtggcacaaatgctggggacagtgccggccccactcacaggagagctgctgggctggctccaaggctcctccgtccatggctgctgggctggctcggaggctgcctccgtccatggtctctgcagtggacagtctgtgtcacgcctccatctgtggtctttgcagtggacagtctgtgtgacgcctcctccgtccatggtttttgcagtggacagtctgtgtcatgcctccatccatgtcttccagcaacaccacctcactctgctttacacaatcactccacctccgtgtaatgcccaaccttgtttttcctttattcacctagccttgcttctcccttagctgagagagtcacacaaactccatcttggctctttcaccggcagccccttcctcaaggacttaacttgtgcaagctgactcccagcacatccaagaatgcagttaactgataagatactgtggcgagctagatccgcagttcccaggaatttgtccgaatgataacgcccgaagccccgcgtctatcaccttgtaatagtcttaaagcccctgcacctggaactgtttactttcctgtaaccatttgtccttttaactttttgactacttaacttctgtaaaattgttctaactagacccccctccccttcctaaaccaagatgtaaaagttaatcaagccccttcctcggggccaagagaattttgagcgttagctgtctcttggttgccagctaatagaggactcctaattcatctcaaagtgtggcgtttttctaactcgctcaggtacaacatccccacatgccctgcccccgctttgtatgcacacagcacacacctgtgcacatacaaacatctgctttcacacatggacacactcactgaggtgaagaggcacactcaggcacacacacactcacatttggtacatgcagctcctgaggggcaaggctgagctccttctcaggaacggacacaagactgagggctgggtcactcagatactttgcccctcgggccccacggattgatttaggggtgaactgtgaatccctgggagattccttcctgccacgcattcctgctgatgggaaacaaagcggtctttgagggatgctggaggaggcagcagtttgtgataaagagctgtgagaggagaagcccctttgccacctgccctcctttgtgcattggatgttgtcctcaatggacgtgatgcctggagtccctgcagccatcttgcctccatggggcaagccaggaaaacctcaccgacttaatggcttccctccagcctttccaaagccttgctctggtctcagagagttaggaattctgtcacttaaggcccagagcatcctgctgctcccttcactccagaaccagagccacacggctaacaggcaaagggtcaggaacatagcccgtgttttctgctctcggcacttggtcattctgcatagaatttggctccaaggcctggcctgacaccttcgcaccaaggtgccgtaaatgaaacctttactcctgagacttcctcacctctgcgttcccagggatccacaatcttctatttgtaaaatgattcccggttgtcatggagaccagggcaccgcagtggagctggaatgttaggtggggtccaaggttcagtcctgggggtagggagtggggcaggcagcttcactgggccctttatctgcctgattctcatctttcttacacaatagtctactcattattccttccctaagggccaggacacaggcctgcctggggttacagtccctgtctttacaagtcctctccttctggctcttgggcgtgcctgagctcaaaggagcctccaagcaaacttggcagggggtgtcccccagggcagaggtggggccctggctcagcacccccagaaaccacaaggtgggggcggaggatcctgcacctgaccttcaccttcgtgtggatcagatcagagcagaagttctatttctggaactgtcagacctgctgacctccagtcaatggcagaggcaggaaggcaggcagaaatacaagatgcagctcttgttacacctcctgcacagaccaacctagtctcggctccacacagccactcactctttcactcaacacgtgtttccgagcatcttctatgtgccttttctctatcatcagatgggggcccctgcggtgggcagaataacggccactgcaaagatgccaaatcttatccccagagcttccgcagagatcctgcagatgtgattcgagtcttccagcaacaccacctcactctgctttgcacaatcactccacctccccacatgttgcggagattctcctgggtcagtcggggggtccagtgtcatcctagggtccttatgagagggaggaagggaggcggaggaggagatgcaaggatgaagcgaaggttggagtgatgtggtctgctgcggggaccctgaggcgtgcaggcggcctctggaagctgaaaagacaggaaggcagcttctcccctgagcctccagaagaacccggccctgctgacactggcccaggagccccttcccccatcagggcctggagagggaagaaatgactgttcacagattttaccccgcaagacccatttcagcattctgattttgagaaccataagacagtgtgtgttgtttaagcctccaagtctgtggatattcattacagcagccttgggaaactgacaccacctccccctaatcctccctcccgcccccacctacacctgaaccctccccttgctcttctctgccgattcacagggattcacactcttcctacttgcagctgtgacacgggaaacatcctccaccaggtcttctctcacagtgtggcctctgcgcacaggttatccacctgtagacctggacgggaccctcgaggctccctactctgaccatctggttttatagttgaggaaccagaagccgaggcaggtaacttggtgcagcctaaaggcctccatccctccagtgcccacaacttaggtgcccacgacaacaacactggcctaccgcaaagacccagcccagaggaacaaggtgccactgtatgtctgaaaagggggccctcggcctcactggggagcaccttcctccatcagggtctcgacggtgaagaagcaggctgtttccatcttcaggatacaagccatctgcgcataggaagagggtccagaggctcatctggaatccctcctcactcactggacggaggacctgaccccgttcccatcattggttctgaatccatcagcccagcaagacaggtgtctccagcaagttctgtaaaatacaaccatagccgggcctggagtcagcccccaataaagggttcaccatggagtcaaagcttccttcacattgggaagagcctgatgatgccgccttggtgccacccgtgcaggccgtgttccacttctgtcatgggctggagagaaaagagcgacatggacctgttcatgaaaggctcttcccgcaacaccaagcctggggcctgcagggccgccatgaagaaaggtggctcctgcttggcagagagaaaaggggagggagggcaggtgagtcaccagcattgggcccctcagcccaggctgccaaggcagcccagtggaacctgtccccatacagcatgtttttagtttgaatggttttacagtgttggagctgtaactttacaaatttgctttgccttcataactctgtaagagctataagcaaacgtagctttaatcagcatttacagcgtgcaggagcatctttcctttaattctgcaggaggatttgtgccctgtggatgccataacaaagtatcacaaacccacaagtcaggaaggaaggtgtgggcagggtgggttcctcctggaggctctggggacacgtctgttctgtgcccgcctccagcttctgacggtcgtgccaatgcttggcctcccgtgactatggaagcctctctgtagtctccacttccatcctcccagcgctctcctcccctgtgtctgtccctcctgccttctgtctggctaatctcatgaggacaccattcattgggtttagggctcactctgaatccaagatgagctcatctcgagattcttcttctttttttttcttttttttgagaaggagtctggctctgtcacccaggctggagtatagtaacacaatctcagctcactgcaacctccgcctcccgggttcaagagattctcctgcctcagcctcccgagaagctgggattacaggtgtccaccacaacgtcccgctaatttttgtatttttagtagagacaaggtttctccatcttagccagtctggtcttgaactcctgacctcaagtgatctgcccgcctcagcctcctaaagcactaggattacaggtaagagccatcacgcctggctgggattcttaattatctctgcaaagaccctatttccacataggtcaccttcacaggtaccagagggtagggcttggacacatcttttgagggaccactactcaatctactacactaaatttgagtaattatgatcaagaccaacccctcattttgcagaagagaacaaggcctgagaagggagccagctggccccagcctcacagcactgccaccacacgcaggccagcgctcagccacagtggctcccccaaacttggaccatgaggcacctgctggcacccctcacctggcctgttccaaagcactatctgaggctggctgtttgctttgcttttgtaactctagaagagctacaagcaaacatagctttaatcagcatttacagtgtgcaggagcatctttcctttaactctgcagaaggattcgtgccctgtggatgccgtaacaaactatcacaaacccacaagtcaggaatcaaggtgtgggcagggtgggttcctcctggaggctctgaaggcatgtctcttctgtgcccctctccagcttctggtggtcacttccaatccatcaggaagccatgggacagagcggcaagaacctcagcgtcagagcccagggtctctaccctggctctgcccccttgggtgtcattcagcctctttgccgcagggtctccaaagtctctgcctgcaaaatgtgcacagaatatctcctgtgtgtggccataaccacagttcacagagataatgtcctttgccctgcatgagattaaccctcagaaaatagcagttaacattccatccagaaggcaagtgtggtggctcacgcctgtaatcccagcactttgggaggccgaggtgggcggatcacttgaagtcaggagtttgagaccagcctggccaacatggtgaaaccccatctctattaaaaataaaaataaaaataaaaataaattagccaggcacagtggcatgtgcctgtaatcccagctactcaggaggctgaggcaagagaattgcttgaacctgggaggcagaggttgcagcgagccgagatcacaccactgcactccagcctgggcaacagagccaaactctgtctcaaaaaaacaaacaaaacatacaaacaaaaaaaaacccatttcatccaggcccgtaagtcctcagggcgaccctccctgtgaggacaaggtcaagaacatcagatcctggaggttgcaggctgcccacttgcagacctggaagcagaggaggagcacaggctcccagggacactcagagggggtcctggagggagtctttctgcaggatgggggtgagggggctcctcaaagcctccctactttgacggatggcatctgtcgagggagctgctacatccacagccaaacagcagggaacaggacagtgtgggggctacgtttcagcagcaatgattttttttattttttggtaacagctttattgagatataattcatccaccatagtaaccacgtaaagtgtccaattcaatggcttttacaatattcagtagtgcaactatcaacatggtcaattttactacacttttatcacctcaaaagaaagcccatatacttcagctagcaccccacagttcctccatgtcccaccagcctctggcaaccatcagtcttctttcagtctctatggatctgcctatctgggtcattttctatacacggaatcatatcatcggtgatctttgtgtctggcttctgtcactgagcacagtgttttcaaggttcatctacattgtagtgtgtgtcagtgctttgttcctggctgagtaatactccactgtatggatgggccacatttatgtatccctccctcagttggtggacacttaggttatttccaccttttggctattagaaataggaatgctatgaacattcacatgcaagtctttgtgtggacatatgctttcatttctcttgggtataaacccaggaatggaatggctgggtcatgtggcaattctatgcttaacttagttgggagacaggcactgcaatcattttacattttcatggatagcatccaagggctccaatttctccacatcttctccagctcttgctattgtctgactttttgattatagacagcacagtgggtgtgagatggcatctcattgtggttttgatttgcatttccctaacaactaacaacggtgagcatcttttaatgagcttgttggccgagaaagctgcaatgattttgaacacagtcaggtaaacttggaggcaacagggtgttggggtaacggctgaaaccctggaggcaggaggcctggctttccgtgtttgttccagcacttagctggtgggtgatctgagtcaataatgactttctgagcttcctggtgaggaaagccagaaaaataacactaaacccccggagtgtcgaggtgaacttttcctcttactcataatgtaggtctagtacctggtaccaaaaagttgcttcctaagtagctattgctgtttattgtgaagcaaatgaggtttagaagcgctggcagtgacgaggcttatgtcccagttttcagcaactgctcaggttgcttcagaaagatcccaaatcacagacacctgtactcactttctgttgctgcataacaagttaccccaaatattgccgcctgcaacgcccattgattggctcacagttctgcagcccagcagggctggattctccactcagggttctttgagggtagaatttggatgtcggcccagctgcattcttgttgagaggctctgcagagagtccatgacacagtttgggcctgtgtcctcacccaaatctcatctcaaattgtaatccccataatatccatgtgtggagggagggacctggtgagaggtgactggatcgtgggggcggttcccccatgctattcttgagatagtgagttctcacaagatctgagggttgtataaatgtttgacagtttctccttcacacactcctctctctcctgccgccttttgctttcccttcaccttcctccatgattgtaagtttcctaaggcctccccagctatgtggaactgggagtcaattaaacctctttttttttttttgagacagagtctcgctctgttgcccaagctggagtgcaatggtgcaatctcagctcactgcaacttccgcctcctggtttcaagcaattctcctgtctcagcctccctagtagctgggactacaggcgggcaccaccatgcccagctaatttttgtatttttagtagagatggggtttcaccatgttggccaggctggtctcaaactcatgacctcaggatccacccgcctcagcctaccaaagtgctgggattacaggcacgagccaccacacccagcccctgtcctgtcttattgaagtcccttgccagagctactggccctcaccctgccccagtgctggcccttgtccctcacccttcttccctcctccttttcctcctcaacattcccaattctctaccaccatttgttacatcgatctgcccggaacctgctgtgaagaaaaagacctttctcttgttgagaggtgccctctgttggaaatctcttgggcgctagggaagaggtgtccggggacacaccctccctggttgcctatgcagatacacagggaagtacaacctcaaggtaaagtgccttctcctatggggtttaaggcaaggacatcacacctggacggtgaggccaggaggcttcctggagaaaggcagcagccaggcagaggagggcagggcttcaggccaggcaggatgccccaggaggaggggttcagtgtgcaagtcgggccatggaagacgtgggggctgggatgggggtcaaggagggggatgagagatagggctggagacagggttgctgcaggtagaggagctgagagaggccggacggagggaggcctggagacctcgagcctcttagagccctccccagggagaatgaaagcaggggtcagggctcagattcaagggagacttggagcagaacccagtgcttggctggatatggggagggcgtgaagagaaggaaggctgccccagactcagggggacaccagggactcccaaagggacacggagagcagagcccgtggcgtgggttgaaggacagatggtgtgtcctacacatgctgcctgttgctttgacacccccccacttccccccgcacacacacactcccacttccggcatccaaggggcaggcctggcctggaggaaggatggatggacgcgcggctctggaatggcacagtgtggggagttggggggaaaagaagaggcactgaagtagcaggcacacaatcagcagctcgctgagattttaggaaagagaaaaacaaccccaccccaccccagctgctctaatagggtgaattcacattaagaccccaaagtccataagataggatctgccctcagcttaactgcaggcatggaggctctgagcctgggctctgggtctgaccgcccaggtaggaacctggcctccgccttgaagcctctgctctgaggaaggtgcgcggcctccccgaccctcagcctcctcatcggagtgcaggggtgagaattcccacatctgggccttgcttcgtaggagagggtgaagaggcaggttcgaagtctgaggaccaggctcagctgaaagccttgctcaagaggctcggtaggatgagcgtgagaaggctcgcggctccacaccccaagcatactcgctgccctgtgtggacttctcagtgctgcaggcaggttggggtctgtattcgtccgttttcacactgctgataaagacgtacccaagactgggtcatttataaagaaaatgaggtttggctggacgcagcggctcatgcctgtaaaactttcggaggtcaaggcgggaagatcgtgtgaggtcaggagtttgagactagcctggccaacatagggaaaccctgtctctactaaaaataataataataaaaaattagctaagcatggtggtggatgcctgtaatcccagctactctggaggttgaggcaggaaaatcgcttgagcccaggaggtggaggttgcagtgagttgagattgtgccactgcactctagccttggcaacagatcaagagtccatctcaaaaaaaaaaaaaaaaagaaagaaaaagaaaagaaaaagaagtttaatggactcacagttctccatggctgggaaggcctcacaatcgtggcagaacgcgaaaggcacttcttacatggtggcagcaagagagagaatgagagccaagcgaaaggggtttccccttatcaaaccatcagatctcgtgagacttattcactaccacgagaacagtatgggggaaaccgcccccgtgattcaattatctcccaccaggtccctcccacaacacatgggaattatgggagctacaattcaatatgagatttgggtgggaacacagccagaccctatcaggagccttaggggaaagagacggctgatgcctgccctgttaggtaccttctcccccagtgtttcctccaccttcatgaggatccccatccttctcttgccttgtgggacagtcctggctgactaatcacattaataggaaaatgctgagttctctcagggcagtaaacagacatctttgaccaatggctaacaggacttgagctggtcctgccagccagatgtgtgccacactgtctacccgaaaactcgcccaatcctcccagcactcttctgcagccagcactgtcctcgctccatcctgtggaaaagactgaggctgggagaggcttggcactgccaggttcccgagcctggccactgtggagtggttttgaccaggtccaaatccgtgcccttgtccctgacccaactccgtgcccttgtccctggcccctcgctcctggcccagcactcacagtggagcctgcagcccctgcatgcaggtctgggtctcctgggattctgtgaccctcatagcactcccctaagtccctggccagtggtgcaccaacacgcaacaggagacttgccactgtgaggagcatccctcctcgttccctcccgctgtgtgcagctttgcaggtgacagagcacgctgtctctgtcaggcagggaaggaaactctctgctagtggggtacagttcaacctggggaatatacttattgagggaaaatccaaattccagagaatttaaaaataaattttattattttctaataaccaagcattactagggaaatgcgatataagtagagatgccagataaaatacaaggcccccagctaaatgtgaatttcagctaattatatttaaaaaaaatttaaaggctgagcgtgatggctcatgtctataatcccagcactttgggaggccaaggtgggaggatcacttgagtccaggagtttgagaccatcttgggcaacatagtgagaccctgtctctagaaaaaaaaaaaaatatatatatatataatatatataaatatatatatataaaatatatatatatcagtatgtcccatgcaatatttgaaatatacctatgctaaaatataatgaatatatgtagtgaaaatttaaataaaatgttagtaaaattgaacagttaaacattgaattaaatatctaatgaactactttttagtataagtacgtctcatgccataagtaggacacacactaacaatgatttgttgattatgtgaaattcacaggtaactgagtgtcctggagtcattttcgtcctgtacttttatttggtgaatctggcaggcagctttccccgcctgatgaaacttgggagttgctgccgccctctgccacaaggttggccgtgtcttcccctgccgctcgcagctacacacggtgcacgaggcaaagcagcggccagacgccctctgagcgtgatggcgggcaggtgcccccaccagagagccccaagcctgagcactattcctgtcccttctaactctgctgggagccccatcttgcctccggcgtcagccccacccccctcagctcagcctcagcacccctgcagcgggggaatcacagccgactccttgaggtccctcccggcaacggtgcccactgcccactctgcaggggacagagtggaagccccaagagggacgagaggctacaagctctggggtggggggtgaggtcagcctgcgctggtctgacccagtccgactcctcagggcggccggagcctgtggtcgggaggcgtgcggggctgtgcccagagcagcgggtcggtctctttggagcacttcccttctgcgcgcgtccagcaccccggaattgattcacagccagtctgggtctgttttctaaccaagcgccttgctcatgaggcacgctggtgtcctttagaagggacccaaagcttaaagttgcctttgtcagttccctaagaacccacataaaactggccacgtccagggcctctcctgcctccccggcacgaagcggtgcggagcagcaaggccagcctggcctccgcagggaaagctctgcctccagcctggtcgaggccctcccctcagcagaggcaaccctaacagactccctttcccaggagctgacgggcgagtgccttagagccctgttctcagagccaggcaggccgctgcggaggctgtagggaccaaacaaagtcaggtctgtgaaatgctcggcgcgggggcgcggggcccgcagggagtccgggttctctacgtgtcctccctctggctttcctcatcccttcccttccttcctcctccctctctccttctttctcctcctcctcctcttgttcttcttcttcctccttcctgctcctccttcctcctcctcttcctcctcctcctcctctttcttcttccccttcttcttcttcctccctctcctcctcccccccccttcttcttctttctccttcctcgacaccacaacacaaagcagaatgaaattcgtgccatagagaagtcccggcaaaatgctgccagacctgaagaaatggggactgcttccgcctggatggcagggctggggacaattattggaggagagagcaggtggcctgcagggctggtgaagggtaagagggacttgtaagagcagaggtggaccatggcagccagggtgcaccctcccctgccggggcgtcgtggaacctgaaggtcagctggaggatgtgacacttcaggacggtgttgtgggtcccaagaaatgctctggagcagaggccgatggcaggatgaggccggcagcaaggacaaagtgcaggagtagaagaggttagaaggtggcgaggctgggctaagtgggccaggggaggagccatgggagattccagggttcccagcaagggggcagggcaggcgggggcctggcacctccaggagaggcaggagaggaccggcaggtctggggaaatgggcgctggcgtggattgacggagagtcctgtgtgctgagcactgcggaggcatgactcacccctgatccccgaggggcagaccgggactcaggcccagatctcattgacactgaggcttgcacctctggccaccagcctgctgtccctgcactgggagaagtggagccccaggcccctcacttggtacccacgggctattcaggcctggctcccactgctgctgtctcccctggcggggatgcatacaaggctggactctcggcctttcctggggcctgagctagtccatgtcctaggaagagatgaccgtggcctccgttttaacaaacacagactagaccagttgtcccctggctgtcatgtcctaaccctcccagtgggtggtgggacagcacaacccctggccctgagctgtaaggggaggggaggcccgcagggaggtcgcccattggggaggccgccaccaccccagggaggcctgttcaagtaggtcgcagtgatgatttccggtggcaggtcgcaacaggctgcgctggctgtgagaaatgaaggaaaaatgtgcccagataagtagaagcggttcctggtggcttggcaacctcagaggctgcctggctgtctggttaaccccttccctcccgaagtgtggcccagaacacacgtgggacttccaggtcaccctgcacccctgggaagccaggcacacttggtccccctgagttcactccatgcagagtggaaacgatgttgcctgtcccccagtagtggaggccagtaggagctgggatggcgtgcacagccctcagcccagcgcagacaggaagagcacgggcaggctccgtgggggctcacagctccccaggcacagtgagggtggaggggaccttcaggaggggtcagactatggccaaaacatcacccggcagaccccacagagtccactgtggcccctccttcctgagccggccctgctgctccaccccggcggctggagctgctcattaccgccgcctccacagtgccctccaggaaaacccacagggcctcgccccacagagtgcttctgtgcccgggacctccccggcccctttaggagtctttctgatctgccgtcttagaagcgctcccaggaaggtgtggtcttcagggcgccccccctgagccaccccttcccacaaacacgtttcctgggagctgaggtttgggccacgcagggaattctgaccagggagacttggctaagtgttcccacccggcgcctgtctcccagccagacccggccagacgctctcatcagcacctccttcccgtactggggccccagggagaaagctctaagctactgcccagctggctccaaaaggggtccagaaatcactttgagggtgaccctggggctgctccctgcatacccacatacccccccccatttccgacgagcagcacctgccctgggcactccccagcttgccctccttctcctcggcagatggggcttcctgctgattcttcctgcaggacagtcaggtgtgtgagggcgggccctccagcctgggcacctcctcatgcggctcccttggtgagccgccatcacacagaaggcgggtagagggaagaaggcagtggacttggtggtcctgacccttgtaaacctgaggacaggaagtgagcagcgctgtgctgagctggtgcctctgggaaatgctgggctccctggggccttgactgtcctgttggtggccaactcccttggcgtgtggtcctgtgcagtacacgtctatcaaacgactgcagacatgaatgaatgaatgaatgaatgaacgctttagcctgacttcataccacataggtaagtttcaggatgttagcacagctaaaaagcaatagggcaaattacaaaacaaaaaaagaaagccaaaaaaatacaaaactgtcatgagcacgcctggcctcgtagcaacccaccaatgggactggaagagtcacgtgaacacacacccatttgctggctttagctcatgtcctggctgtacaggacttgcctctgtttcgcagccatattgctgtttaatttattcagggagaattcacatagcataaaactgagcactctaaagtgagcaatccctggcacttagtgcactcacagtgtcatacaaccagcctcaccctctagctccaaaacaccccttctcacccgagtaaaaccctggccccatgaaacagtgtctccccagcccttacagccaccagtctgtctctgtggattcacttgttctgatataaaatgggtggtaccatatgtggcctctccacctgccatctttcactcagcaccgtgtttgaagggtgtatccacatggtagcccgtatcagaacttcattcctttttatggctgaataatatcccattgtagggggagaccacattttgtgagtccattgatctgtggatgggcatgggggctatttcctctttcggtcctgtggatagtgctgctatgcaaatacacaggtgtacatgtagtcattggagtcccaattctttgtaccatcaacagtttttcatcgtttataaaacattagatctgtagaatgtctacctcaacctccctccgtttccaggcatgacttgaccaagggcacagagggtcaggaatggcaggggcaggccttggaccaggtcttctgaccacatcctccactgccacgaggatgaaggtccccgtggaaggaaacggagggtgtgacccactcgccttagcaggttaggcaacacccaccgggccaggccgcaggcagtgctgttgaaggcggggccccatcgcctcccaccacccactaaggtcacaggaggcagccaggcttgcccacacatgggggcagctagaggaaacctggttagggcttcagagaggggtcaaggttgaagccatctgaggggtcagaggcaggaggcaaaggggcctctgcttccttcagcggcgaatccagagtctgggtgcatggaggcgagcaagaggaacaggctcgttagagaagccccacccagttactcagcacctggtaaacatcgattattcccactccgggctaaaggaaagagaaggaaaattccctggtaatgccacctccccaagcagccaccatgagcctttgagggtttgtgtgcatggaaagagaaatctggtgtggatgattgtacgtcagtggatcagctctaaatcaatggagcgggttttatggtatccccttggtttcacatcaactaggaggtcacttgtgcacctgggacatcaccttttctcctccatgaaagctgtgaaattctcaacacctagtccagcagctggcatgtagggggtatagaaaaaatgcttgttgtaggaactaatgctgaaacccaaagcggccctcgtagaaagtaaaagcagatgcccttgatgcctgtcattctaggatccctcggagagaaggcacgcccaccacttccccacacctcccccagcccctggctcactcatgttctgagcccttttggactctcctgccggcaaaaacaagtttaggcagcattttcgcctctgtcctgttaatatctcagtggatatcttaactacagaatagacataacctcattataacaaattaactcaactcagcaactagaagggacagttcccgtttaaaggtaactaatgctgaatataccacaaagagatagaagatggatacatgaacaggaagttgagatttgacggacaaaattaaaaggagttctagattgaaaatcactttccttagaatgttgacagcattgttctcttgccttcaagcttccgtttttattgtctgtgtctcaccaaatcagtaaatgcacacagtgcaaaaagtgaaaaactccgggcaagaaaacacaacgcatgaagccctgctctcccacctgctcatcccctaaatccaggtctcacaccgcaggcagtcacactccagtcttgcagcactttcttccagtattctccccatcacatgcttacactgatgtttgtttgaatttttgtttaagattttatgtatttattcccaactagggaagatgaagatttagggctttcataacagccccagccacacccacagccaccctatagagttatgtcatcatttacaatgaaatcaaaatccactgtttgtacatcattatgattcaatgtgattccacccaacccaggcctgctcatttggctggatgttgagttctagcttggaggaggcattctttgctgccagttgcatggactaaacatgaaaacattcctaccgtacagctagaagtgttggataaaatgtgagactccttttaaataactagctaaacatacaagaagaaaggagacaaaatctccaggggccaaaagaagagggaaataaagcctgaatagtgaacatcggctgggcttagattgacttggggattgcattaatattggcacccagggacctggagttgaacactccagagacagaagataagctcaggggcccaagtgaggcaggatattataagcaaaatccttgaagggccaccctgagaggaaatatttacccaccagcagaggaagatgacctgaaagcatatctatctcagtccatgccaggagaaaaaaaaaaagagaagagaagagaaagagaggagaggagaagggaatgcctcttaagagcttgtaatgatgggtctgtcttgttcaggttttggatttgaatttatactccctgcatagtccaggacccacagagccacagaattagcacaaaaatgatcacaggctggcaagacaactgagagtcttgcaaacacaaaatctctcagtaaagacagcttcagctcaagcacaaaagattctcacagatagagtcctactgaaaatgaactcacaatccaaaattataaatcacacaaggaaacaatccaccagcagacccaacaatcagaggaattggatccctaagaaccctaggtaataggattatcagatgatggcttttaacaggtatgtttacaatgattacagatataaaacaaggaaatgagcacaagatgctaccaagaaaacaaggcagattcagaaagaatggagtagaacattgggaaatggaaagtatagtgagtgaaataaaaatctcagtggatatcttaactatagaatagatataacctcattataacaaagttagctcaactcagcaactagaatgagcagttcccatttaaaggtaacttatgcagaatatagcacaacagatagaaaaatggaaatatgaacaggaagttgagatttgaaggacaaaattgaaagttctaaattgaaaatcactttccttaaaatgttgacagcattgttctcttgccttcaagcttccctttctgttgtctagaagtctgacgcatctgatatctgatttagcatcttcttgcactccacctgaaagcatttaggatcacctctccagctccatcctagagtcacctccccatccctgtcctggcatcaccaccccatccccaacctggcatccttccatgctgggcttgcaatggctattctcctagccatcactctaagcacttgctgagccctctttatgtgagattcctgtactttagtttggaaacattttcttctttttctttttttgaaactcctattattgggatgatgggcctcctggaataattctctaattttctttcctttcctctcctatgttccacttctttgtctatttgttcttctttctctgataaattctttgctttgctttcttagacttattttccacttttgagagttttatttttctcatcacattaaaaaaatttcatttctgttctctaaatatttacacacacacacacacacacacacacactcctgagccggtgttcattaaaatgtatgttctgagacattatagattttgaaaaagtcttcttctgatccatactttgttttctctgcttttttaatctgcttgttggattggttaggatggtcgtgtctttgtctttcacgttagggctttctttgttctagtgggatctctgttcgtttttcagatgtcagttagcaacagatatttggaagctctgtgtgtgtgggagagcttatcactgggtgactgtcactgcagcatgatggagggaacttctaaatgtcaggtctgcagatcttttcctgcttggaggtgctgagagaagggagagagcctggaggggtggaggtggggtgcaggtcacgtcttaagtacatagagtctacccgatttcctcctgctgagttgcttcccccagccccactctggatatgcctggagttgtggggttcaggcacatctggttcaaacttgtcctgtctgctgatggagtggagagtgggaggccatctgggtgtctacctgctcctggtgagggcgctcaggtagtcctcttctgtcccactcttctctctgtccttcagagtctggtgcctccacccctaaagattgacattattgttggtagattgaatggacgtaacattattctgtctaatgagtatacattttctaaatgcttgtttagctcattgtggtctaggaacaaatggttttcagagccacacggcccacagacagactcaccacctcccgatgtggtctccaccaggccagtggctggcctataagtgacaacatccagccacagcctcattagggcaccaggtgggcttgtcaggtcgcacaccttggctgatcggcaaatgaagggaaacgccagcacatctccgtccaccattatcgtgagagggcactttccagctcttctttggggacacatccctccgcaccttccctcccttcctcctcctccatgcaccccttcccgttcaccgtgaagagaccagctgggctggctcctcagcagacccctcctcaggaggtctggtctggcttcactgagcccacaaaggtgatgggtttggctgtgtgccagcacgcggccatgccctcccctggtctccagcatcatcccacttataaagagtcattccttgaaggcaaagatggggtcccacatcacccagtgtccttccccgcaccagccaaggtcaccctcgaagagcaagttcttccccacagccaccaggaaagatggaaaggaaaaggagaggctctgcctgagttccacagcccaggaggaggccaccctgtcctttctcctggagcaagggcagcctccccaccggccccacctgcagagctgccgggtgccacctccctgagtctagtttttccagtagcaccactgggaccaggaagtgatgtaaggaggaaggaagacacctcagggaggccagcttcctctgggttgcctcagaggggctgaggttgctgaaacctccaggctccattccaaggggtgaggtccgcccaaacatgacaacgtaaagggaggtcctccccgaccctcaagtcccactctctggggccagccctgctcacgctttggggagcacctttctgaagagctccacacagctgtacattgatactgtcgagtttacatcgtgttgtgcagagaaatgagaagtcgagaattcatcctgctccaccggcttcctcaccttctcttgcattttctttttaatctagcatccaatgcatttttttttttaatttaagcttccttcctttgtgtgctaacattttacatgtagatcctagcacatttctttaggcaaggaaacagaccctttgttgagcaccgtcatcgtggccactgcagttgcctgggaggctccggaaggttttttgactcctgaagccagctgaggcagccacctgagcaagggggttgttcatcccagggctcaccctcattcagggccatgaccttttctagtaagtgtgcactctcttaggtcccaccctgtgtcacccggactctcttggagttcggtatgtggagatgactttcttcctcactctggatgcaatttgggaactacaccgaggattgtggccaggggctcttccctcacctctgacggatccagtaggtggtcccagattctcactctgacccacccactatgacttcaaagctgctgtgcacagttaccactgctgggcagaccttccagaatcttccagaacatcccatgattcagagggaagacaccctggatgagggagtcctccatttttccgagcaaatgcacgtgttctacacacaactccaggtcattctccagtggtacctgagccctccatagggcccctgtgagggatcctgggtggggacttctgtgactgtgacagctggcctctgggccaccttttccagaaacagcattcctgattctcccttgggaaaccatcacctccacattcagggtggcgtctgccagcctggcccagcccgggctgtgggaacactccctccccgggctgacatgcttggttttgaggatgggcgcaacctgctgtggggccaccacactgcatccactctgagacgccatgaattctaatcctaaatgtaccattgtcctgatcacctccaaaataggaaaaaatgctgccaatgacaattgtaagaggccattgactccctcatagctgttagaatgcagaaaaaatagcatctaaggaactacgaatgatttttaatctggggcttgggaaaggggaactattgggagaaagaagttctctttgcactgagatcctcaggccatttaaccttggagacaagaagacagggatatattttgcaaaggacttgcccattactaaaggtgacacaggggaaaggagacactaaacatctggatccagccatttctgacactggatttcatgaagcagtacttcttcttcttcttcttcttcttcttcttcttcttattattattattattattattattattattaatatttgtctgcagggcctaaagcagtgactagcaccattcctggaacagactggccacctggtgcctccttactctgcagtaaacattggtgccgctgccctcctgaacatcaaagtccgtggacaggtgcagagaaggccagagcccaggcacctgagaacagggccccgttgccttgtgcagtggagttctgaactcctgacctcatgcaacaattagttatgaaagaagggagaagcagggattgggagaagaaagggaagaaagaaggacaaaatgagggagggaggaaaatttgttcagggttgatagtctaagatgtcaacctggcatccaaaatgtcagctttggggcagggattccgtcctccaaatgtcaccttgtgccagtgcctgcccctccctctgcagtgccagtaggaggccttcacacactacacccactcttttgaaatgaacagaccagctaaccttggcactgtggatgatcctggtaaacaaagtcccctgagtactggggtcagtcaggttcaagggcctgggagaagatggcaactcctggttcaatagcctgggagtggagcactctgggtaaaccagttgtttgccaaggaagccctcaggtacacaggtccctctgctgtcaggcgtcctggtgaagcaccaagaggttgactggccactgccctccactcaagagggacttcagaagaaccctgaagtgaggcccaaaatgtcctaagatttgtaggacagtgtactgaaaccacagatccagaagacatgccaatcatgggtcaggtgttccccatctgctctctgagagtgtggcttcaggtgtgggtctaggttgagtgctgacaatgaaatcttggtgcatctgagcccagcaggctgtttctgacttggctggagctgaggatggaggagcacgggaagaaagtatcccaaggacagttttctgagccagtgtcatggaggtgtgaatgaagcggggcagagcgggaaacccgggcggagtgctccactactcctctttggctggtccctgaactggatatcctggtcagtaatgaggggatgtttggccccataccccccggtcctgacctcatcccctggccactgggagggctgcagtgagctagatggtctgggggcctggatgtcagggcatgcggacctgtcttgcaccttggtttgctccagccggggagaaccacttttcttctagaacctaccatctccacatctcacagctgatgaaggcaggctggaatcatctctctgacattgctcagggctggggttctggagggaatagccaggggtgtactaaaagacccttggccccagaacaactgcagagcatgtgaagcataagacccacttttgtttcctcccaggaacaaaggggcagacttttcctaaagtggaggatataaaaatgcattcaatcctcaaaccagaagatgctcctgaacgaaaaaacacagaatagagatcagaggggaaggaaaatgcctgaattttctgagaaattaagaagaaaaatgggaggcttgttaaattatcactatttcaagacaggcaaggaaataatgtaggttcctaaatgaaaaaaaaaaagttaagctaaatgatagtcttagtaagaaacagttcctaggcattgctacctagcataaaaatctttaagggtgagtcaccattctgcagggccagggagacccactgacagggtcactaggcacggcgcagccaagaaggccaccagtgttgtcagggagatcatcacacaccaagattgacctcgtgtgtgtgttgaggatgatgggaatggctcccacagccagagaaaggagatacaaatacagaccagcaagagtgacccctgggatgctgggctgtaaccgaaggcatggatgtgaaatcatagtttctagtaagacacagaaacgtgtatgtgatattcacataggttgcatgcagcttcctacgtctgtctgctgagggcctagaagcaatgacagcccagtaacaatgagcacctccagcacccacatcttggcgtctaagaaccattctccactcagagaaacggtttccttggagaaatggcttcttccaaggctggggaaataagtacaaggtgggcctggaactgtgtcagaaagcaaggaatcactcagagaaagatgggaggtgagggggcacaggagcctgcgtagaggtgcccaaaccggccaaatcagggctaacctgaccatcaaaataatcagaatatcccatcaattaaacagggatccaagactgcatattgatgtaaataaacaaaagtgggaggggaaaaagccctccttggtacacagtatcatgtctgtggtatttctgccaaaaatgcgtaacctaaaccatatcttgaggaaaattagataaacctaaactgaggacattccaccaaataactggccatacttcccaaaaggtctgaatgaacccatgaaggagctccatgtcataagttaattcaaagtcagaaaagagaagactgaggaactgacgattgataaaaacggaagccacatggctattgaacaccatggggtcccaggccagagagtgaaaaaaaaaagaggtgctgcttgcgtgtttttcaactttcttcttctataaaggacagttttgagacaatcagcaaaatttgaagagaatttgcagatttgatggtaatatcctaccaatgttaatttcctgaatgtgatgggtaaattgtgggtgatgcaggagaaactcttgtttttaggaaatgtacaggcaagtatttaggagtaacagggcacactgtctgcaacctactctcgaacaggtaggtaggtggatgagaaaggcaaatacaatcaaatataagcaaacagggaatctagctgaagggttaccagagttctatgtactactcctgtcacttttctgtaatctgaaattatttcaaaatacagaacgtaagaactataacatttcaataaaaacttcagtgttgggagcttccatcaagacacacttctctcccccacctgatcacccgtgtgcggagggacccaggcagaggacgacgcccggctccaccctctgctttctcggggtcccgcggcctgggttaattgaggacacaggggcccttccagaaggccatctgcaagcttccgtcactgcctcaagcctttggttttcagaaaccagattactcgagctcgttgataagaaaaagcagtctcaaccagcttcaaaaaagtaggcaagtactttgctttattgacatcaaatggaacttcttgtccctcacgcagtccacacaacagtaaaggcacaatgaggcatattaaaacatagccagtttcaacagcttggatatttcctgccatggaaaagtatcctgcccacagattcacattaacatacatggtacattaatatcaatctctatcatataccaggccacggtacatgtttgcacgcagggtcacgttctgcaacaaacttattctaataacagtattcagaaggcaccctatgggacacaggtgacagtgaagttacgaggctagatggccacatcttttacatccaagaaccgccctggggccacaccccaaactgctgaggtgcggaggcacgtctgcaaagcaggtcagaaacactccccccataccccaaaacactatccctatcccaaatcacctaacaaaaatgagagctgggaagggcgcaggtgagcagtgcatctacctaggtaatactgtctatgtctaggtaatactatgtaattttatcttcatactgcgtgtggagataaaaaacacagcttctcctgcacctcttccccaagactggtgcactccagcgacctgagggggctcgcctcagtccccagcactgaggttacaaagggagaattttttaatgacttaggcctgtggctctagagttgccaaaacatcttaggcaacgagaaacgaacggcagctagtaccatgtgggcacgtgtgtgtggttgtccacaaggactcacccaagtaatagactggaatggttaagagctggccacacatacgccccgcaaagctggctgctaccattcgttccttgttgcataaaacattgttttcaaagccaaccccactacttagtcatcatttagagactagactatccaatgttatgaacatttttaacaggtttcaagcaacagctgataaggtattcatctcttaagatattttataaaacaattccatggaaactttaagacaggcctctctgcccaccgtcatgtatgaagataaaaaacacagtttcccctgcacctccctcaagactggtgagctccagcaacccaaggtggctcgcctcaggagagagtggatgcttccacgcctggggcttcatcactgagagaccagcctcagcgacccattaggagcacaacgaaatgattctgacccacggtcccttcagacagcaggtgcctagatcgatgatggagcgggcatgtgcacctgagccagcttcacctggaggggacactccggtcagcagcagccgcctcctgatggcaccatgtcacctctgcttggttaacatttaggtaagccacaacagggccccacgcaggatcgttccatccccacgaggaacacaggacaggacaagagccccacgtggacccccggtctccgcaggcagccagctaggtcttgcttcgccgcaggagcgtggcggcggggccatggccgccctggaacttgaggctctgcaggttgatgtgggccccatgcctgagcagagtctccaccgtctgtgcgtgccggccctgggcggccaggtgcagcgcgctgagcccctgctcgtcgaacaggtcaatgacatcggcgctgaccaactcctccaccacctccgagtgcccgtgggcggcagccaggtgcagcgccgtctggttcaggggtccccgggccagcacatcggccttctcctcgacaagcagcttgacagtggccaggtgtccgttgcgggcagccaggtgcagagcggtgtagccgtctgaggtcatggcctccttgccagcgccccgatgcaggagcagcctggcagtgctcgtgtgccccgtctccgcggccacgtgcaggggtgtctgtgccagcaggctgcagacgttgacgtcggagcacaggtcgatgaggatgcgggccacgcggtagtgcccgcgctgtgcggccaggtgcaatggcgtcctcccatccagcgtctgggcgttcacactcacccccggctgcttggccagcagcttgacgatgggcaggtggccctgccaggcagcgtagtgcagtggcagccaggcatccttgccctgcaggctcacgtccacgcctcggcgcagcaggatgcgcacgatattctcctgcccgtgctggcaggccacgtgcatgggcgtccggccctcaaagtccacctcgttgaccgaggcgttcttctccaacagcagccgtgtgctagactcgtccccgttctgggctgcaaagtggagggctgtccactggtcctcatccttggcgttgacactgatcttccgcgccagcaggagctccacgacaccccgcaccctcctctccacggccatgtgcaacggggtggagcccctacggttgctcaggttggggttggcattgttgagcagcagccacttggcgcactcctcttgcccggcctccaccgccaggtgcagcaggctggcaccgctgtccagtgccaggtccacgtcctgcggctgcaggatcttcatcagtttgctggtgtccccggacacgatggcatccacaagcttcttcttctggacgtctgtggtgcccagatctgcagggagaggagaggcaaaggtcagagcgtggctgcacatccagggacgtggcgtctctgggagcctggctgtggcgctcaggtggaggagtgccatggcctccaggctgctcgctggtcacccgactgtgtttgagcgttgtctgtgcctcgtgattaaggtcagtcctagcgggagccccggggcaggctggcgaatgtctcccaggtgctcgttagtcggtttgcaaaataaaacccgctctccctgtcctgcggggtggtgagcccccttggtgcttagagatggcagtgactgcaaacatcccttcattaaagaaagaaggaaaaagggcacagactaaaaagaccaggccagagctcccattcgcctggaagccttggcacctgccacccacggacgccccaggcctagcagcctgcagagatggtgactagagctggaaggggctgctccagctcttgccccacctcgaagtggcacctcctgacctggggaggttaagtcggaagttttctatgataatcctgaagggaccgagcttctcgtttcaggaggacgttagtccagcactcaggatgaaaagttgtatttaccacaaaaatcctaccgtagtgcctggaatgctgaaaccctgcaacgagactctcctccgccctcatgtgaaacgcgtggggacttggaagtcggcggtgggaaggtgttaagaaaacggaaccctcccagtcaggcttggtgtctgaacactggcactccaagtggagccagtgaagtaattctctctcgagcatgaagacaagatgtcatttcagagtattagacccaaagagaatgttctagaacgtacttatccatgggagatggtggtatttctttctgctcagtcttagactttgccctgactctcctcctcaagcccatcacccactgcttatctgccgtcgaaccaggtcttccccactgtgtctatgtagcattgccttaaaacaagacagcctcctttgcccccaatattctaatctaaaaatcccgggaagtctgtaagatccaggaaaagtctttgcctccaagaggatgtttccaatccaccaggaaaagccaacttccccttcccccgagattgcagccttggccctcagcccccgtggctgtagccctgagtgtaaatccctgtattttccatcagagctgcagccccttcaggaacagggcaggaccacatcttacccctgcagccggcagaaaggaggccagaacaagcaccaggtccagcaccctggggcagggataggaaaaaaagcaccttccagaaacaaaagccatcaaaattaacataaaaagatgagattagctaaaagagaagtgctcctccctatcaggtggtttgcaaaggtggcctggtggtaaaacctccaaggataaccaacacattactaggcctggactaccgtgaacggggagcccacatatgcgaaggcgtgggtgtgtacccagcagcgtctgagcagagggtgcgggactgccacgcccgagacaggaggcccgccagggagtggggctcggctactcgccaggctcactgcactggagggggtttccaatctgtagacctgaggtcagcctccacccatggcactggcacaggcaagactgctgcacagactggtgatgtggcctgttccccacacatgctaagtgacataagacggagccaaatgcccaacacacaaaattaattacttaagacagagagaacacaaagaagaattcttgctgggtcaagaaactgtccccttgattccgtttagcttctcactgagtccagtccactgtcccgccaagcccagcatctctcgggacacagaggcgtccccactcaccgctggttgaaggttcccgctcaaaggacagcgacagtgatcctctggaagagaaggcggagtccaccgaggacacccccgagagcctcttcccactgccggacgatggcagcttggactcagaggagctgcggctgagctcctcggggccctcgacagcctgggaaactccagagtccagctgtgagagcagctcggagaggctgtagtcgttatcgaaggtgggggcagaggcccgcttgagcctcgcaggcaccacctgcgaagatgcagaagagggggtgggtgaagaccctgccatagaccgcatggcccgcccatgacacaaacacagaagagcaaggtgggccacgggagggagatgggggaggaaaggacggaccctggaagcaatgcagataacctattggtcaccgagctcagaccccgcatcggcacagcactagggagctcagacgccatgtccacacagcgccgcggagctcagaccccgcgcccgcacagtgccgggcagctcagaccctgcacccgcacagcacttgggatgctcagactctgcacccgcacagcgccagggagctcaaagacttggagctacaaagacttgcgctggccccacccagcacggagacatcttaaggaaagatagccttcataaaagtgcaaaatccagcctcatgcagctctggataccatctgctcagtaacactgcacagagcgtcacccagacaaaaggcaggcggtgtcaagctgcagaatgtgaggcatgtatggcgggacacagctgcccagcacaggccagcgttggcaggaaacgagaggacagacaggaactgggcaggacccccacacgtggccacaactgcgacctccccgcggagccacgtggggctggcctgggggctgtgtggggacgagggaaaggggaaggacccggctacagggacgaggggtgatccaatccgacatacaccgatggggccttttaaagagtctcgcttcatggactgcaggggcagcaggtttctggtgggtaagtggaatctgacgggatttcacgcttcttcccttaggcacacctgtttgccccaactccccaccctttgtgggacggctcgaggtcccgcactgttgctgggtgtaccgagccacccctacatgttggttgccttctttcccttatcagggcccaggtctgcctctgtactagcaacccccgggcacctttgctcccgggctcactggcacacatgcactttatgttgaggcagtgggcgcatattcctgatatacatatttcctgatctcctgagctcacaccaacagcctgggattaatcgcccaacaccagataacacgttataaagctcacttatcagctgggcctcacaggtctgctccagcctcatcacccgaaaaggcatttagccagccctgctacttggagcttcttatcacatctgaaatcacctgggtggcactcatcagagtgcagaccatttatgggcagctataaaggaactggatccccgagccaggggtgcaaagacactcagacaccagctctccctccccggccggggctgggccttctgatccccgtggtccacacacatccaatgagtggctatttagtgtcagggaagcccttccgccactcacgcagaatcagacaggaggtggggcggggatgcagtcgggcaggtggacctgagcccccatgggacctacacttctaatggagttgggtgcgggatgggctcagaagagagggagagtggtccgggcggcgggggactctgcaaagaggagtggtttggaaactcctgcctggaagccgaggagacaaaagacccctgtgggaaggactcgttacctcgctcctgggctccggggggcttttcacgtccagatcatgagcagtttctttcacttcgtcatcaggcttttcacacaggtcctcggtttcagaagtaatttcttgtggggaagaaaggggacatgtcactcggatgatgacttctgcgtacacacgcgttccatataaacgcagggcccccacgagctgggggatttctcacacgcctcggcccagcctgagctcaccaggcaagcccaggggccctacatggacaatttgctggccaaacccaggcccccccatcggtaatcatttgaaggcctcaccagactcaaggcggaagccttccccgggggagcgccacctgccagtcacagggagcagagctgccagcacctggcggatgagctccccattcagcccgtttcctgccgtaagctttaaatgcagcagtttccatctcatcagggtgactttcctatgccagagacacatctgtcccaggaagtcaactcctcaagagaagggcgacgccgccggccaccggccaggtaagtccccgggaagagcatggctgcacctgaacttcaggctcccatacagactcctctgggtggcaagcccaaccctggtggggagcagggggcggatggttggaggcaactcagttccagctgccgtggccgagccgtgagtaccagaggccgcaggcaggtgctgggtccaacctatctgtgcagggctcatttcggcccacctgttacacgccttgtttctcacccaggcctggtccctcaccctgtcctgtctgtcacctctgtctcctgtgacacccacagaatgtggcggggagaccccggggtgctcaccttggaaggtgggcctaactcgcggatccccctgccagcaccgctgcatgaggcgtatcaggtggctgcaggcgcgcggccgggctctgcacacgggcggcagctcggggcggtggcccttcaccaccttcaccatgatgtgcaggatgttcttctcatctgccaagggaaggatgcgagtcaggggctctgcagggctgggtggcagcatctcacccttgggaggaaacgacacactcgccgggggccacaatggggccatccccacaccaccccagggagacggctcccccactccgtttcaaaggcagagcttcctgtaaccctcaccctcatggtgcgccatgctctctagtttcctggttttgaaatcgacctctttccctgggttctgatctaccagaaggagtcagtgtgtttggtcacagagcagatctttctaggcatcccatccaaaggaagatgaggttcaaaggagaacaatatcttatgaggctcattccatcaacagcccaagccagcaaagggaatgaggctcacgcaccatggaggagccacagcgtcctacatccacagagacccaactctctctacaatggcgaagaagtcttcctcagttccaactccaatcccaagctcaggtccccagctggcctcccctgccggtgcaccagggctgggatgtgtggaagggctctttcccctcaattcaccatgtggggccgcacctgtcctttccaactgccttcactagcatgcatgggctctagcttattattattattgccacaacttctaccctgactgggaagggcccagggtgacatccagtgggccaagttcttttttctgcttagcctggaaccctcaaggttcttgttcccaacagccctctctgccctccagatccaaacacacccacgcatggaatggcagctctttggagaggccatgtgcctcagcaggtgtggaaaatcagccgagaatcacccacggctgccaggattccatacaatgttttgctccactttcccattaaatcttgtgcaataaatatcgttaagtgtttagcaggctatttccatgattattcagacttcaaaaccaacagctcctctaaataaaatggaagcaaactgaagtaaacgcccggaatgtttcctgctgccaagcacagactggaaaagctggggagaggccttgttctcctgcaccttgaaccccctcctacccatttttgcctgaggttgcaattttttgaatttgaaaaatcagaccttggcgatgaccttgaacagtaggacacgaataattcccatatgattagcgttccaataagggaacactaggcatattcagcaataaagcacaagggcttgagccttgacctgtcccctgcgcctagcttcgggtgtcacatctatcagacactgcctcatttcacaagccttcgggctgtaggccactgtgcgggagaacgtacagaaggcaagaaaggcgacaggcggtcagacaacacagacggacaccggccagcagaggcctggcaggacgcgttctgtgctttctactgacattcttttaaagctgccaagatacttgatcttgcgatgctggaagatctcttctcaccccagcactttcccatacatcggctcctagtctgagccccgactaacaaggggctaggccttgactctcatcttcatttttagacattttcggtcacaccacaaaatatcatgagtagcccagaaatgtctttagaggaaaagggaatctgtccaacaaagctaaaaagtcctggatttttatgataagtaagtcaaggtgtgacaactttgaggatggtgttcggaatggtggctgcctggctggggaagcaaacaccacagctctcaagctgggcaggggtgccactcctgcaagcaactccatggcactgagcagctctggaggttggctgcgcaagcacgcgggtacatgtaatgctcctgaactgtatgcttcacacggctgacatgctaagttttgttctgtgtattttatgactatttttttaaaaagtaaacaaaaaagaattagctggaaataccagcacaggcaaacccctggagacagaaagcaggtgagtggttgctggggcttgagcaggaggaagggcgagggactgcagaatggccatgggctttgccttctagcatgatgagaatgttctggaattagacagtggtaacgcttgttcaacactgccagtgtagttaatgtcactgaattatacactttaaatggctaacatgaccaattttatgttatatatattttactaccacaaaaaaactagctggcacctaaaaacattccattgaacaggccccttcagatctgtgtcttttcctgcatgcaaattacaccacagagcagcacctatggcagcgtggatcacaggctctgttttaggatagagaaaggacaacaaggtgtccccccattattccaggaaagacaagcacattacacctcaaagacaggtccactcacctgcaaacggcttcttctgtgtgagcacgccccagatgacgatcgcaaagctggaagagaaaccaggcacgttagcatctgacagccagagactcaaagccaaatgcactcatgcacagcaacaggcgtgaagacacctgttctgaagccttccaaagacagagccatgacaccgagatatttctcctgtttttaaaaagagaaaattctctatagtgaagcccagcatgttgatagctcagatgtcagacagactcaagtaacttcgccaactgggctacaatcttcaggcagcttgagggacttccaaagagggtgccaccctatgcggggcgtgagctcctggggaacagcgcctgtgtgcctcactgatatcttctcgcaagcaccaggcacagagcacctgcgcaggcatttactgaagaaatggatgaatgaatgatgggcaactcccatgccctcccccaacaatgatttcattctctgaaaacacggattctggttctgatcagcgttcctaacgtaggcttgctgagatttcagcgttcctaacagaggctcactgagagttcatcattagagggttgttaaagaaagtgcgcagaaaacgtaggagacaacacagctgaacgccccaaagcctttttcgggggctgcttagaaatatatagataatatgagggatacgttcatgtacattactctggatacaccaaaaaaagtgcccaaattgattaaaaaaaaaaaaaaaaaaaagaaaagaaaaacagaagtccgaaaactgagcctccaaggagcactgagttggtgagggctgtttatagacaacgaattcaccatcgaaaattagttcaaacggcaggttcaaaagctggaactccaaactctaaaataaatggagaggatctcaatctccccaaactctacaagctgtgactagtctccaaagtgacacttccaggcaactctcagcttaaagccccagctaagcacatgcacaatggccactgtcaaaccagtcagcctgggctgctggcggcggcagtgaccaaaaggcagagctcacatgcggggtccgagtcacagtgctgctggataacagccacaatgggaggcttagtgcctgctcacacgctcccacccacttttcttctccaagaagtctgtgtgattaagacctttacaatttgaaaaaggaagggactaggtgacttggggattgatctctgaccaacaaaggttaagtgccatgaagaagatgagctgctcgcctcacaaaatcagagtgaatttcggaaagtacaaacacacatgcgtacagaccactgaaagcagcaggttcttccaacagacaagccataaagcccacgggtcatgaaatcaccaaggctctgacagggcagggctgtcagcctggcccaaatgtggacctgggaacacccttcctccttggctagcaacactcacagcaaagaaatccctgaactctacaagcacccaccccttctatgtggacttagccccctttctgtttgtttgttttttagacagggtcgcgctctgttgcccaggctggaatgcagtggtgcaatcatgacttactgcaatctccacctcccgggctcaagcaatcccccaacctcagtcccgagtagctgggactacaggtgcacgccaccaagctgggctaatttttgtattttttgtagagatgaggtttcaccatgttgcccaggctggtctcaaactcctgggctcaagtaatcctcctgcctcggcctcccgcagtgctgggattacaggcgtgagtcaccgcgcctggcccgagccccatttctgactggcagcaagaggcctttctgaaagctgcagctcagggcatgaagcattgaggttgagagcccctggcacccacaggggatggggggcggcatgtcacacacctgtatacatcgtgcttggtgtcgaagagccggctcttctccctgatgcgctctggagggaggtaggcgattgtgccaaacaggccatccatgctgaggtcatgcgagtgggacagcccgttgcacttggccagaccaaaatcagaaatctgcaacacagccatcagagcggggctcattagcctgcaacagtgatattttatgatgctttatcaaaagctcccttctgcaatctcagagggtgggtgagagctttccaggagcccctaagagccgtgtctgtgcctctccaggtagccctgccccaggcagggagggagacagattctggggcagaagcaagcctggaggcattaggagcagcacatttgacgggcaggtgaaagaatcgtactgtaaggaaggagttatccgggacagaactgcagaagaattagaatccaccttctgtaaagcatcatgtttgccatggtggttgagagccggctgagccggcataaagggaaaaaaacaagccttcgagggttcaggtaaagagagacacatgtgaagaccaggtctgctcctagagaagtcggggagcaggttatgcaacctgccagctggggaggctggcgggcaagtggctgcaagtcctttaaagggaaacacagaaacacaccttcagaagccctttaaactttaaagcaaacaaaacacacgcctcagagccccgtccatctggagtgttttgtgatcagcagacactggctggctgcttcaaacacatgtgttcgagtgaaggtctgataaacacctctgctggcagcgcccgggccccaaggagcaccggccacccagctcctccaggaatgccctcaacgtccgcattcaggggaggcaggtctcaggtctccttcgggcaaaggtgaccttggagctcactggggagacttcacagacccccggtctgacctctctcgggggcatcccctttcctgccagtgtcctaccctctccagtgtaactcagtcccctttgaagctgctgaaaaccgtatgtgggatgaagacacaagtcatcagcattaatgggactcttgatccagggggagtgctgctctcaactttccttcaaggcatatggatttttttaaaaacccttttcattaactcttgagctcctctcaaacacacccatggagtgacaggaaatgaggctgagtcaggccttaattctgggctggccatgcccatgtggtgagccaatagggctgctgtcatcagcaccaaacagctgggagaatttatgacctgtgactcgggcttccagggatcctgagcacatctgcagggaggtaggggggaaggcctgcgagcagggaccggccctccttctctgcagccaggagcaccaggacaaggcctcgactccagcggctctcatgtcctcccacttccatttctcccagggccttcaggcctgcaccgcccttgagagccacactctgcactccagggaaagcgccagctccccagaggaacgccatcacccgaccctgcaaaccccggcggctgctggacgctgggacacaacaacgggtcctaactctccaaatagctccagagcacaggaagtttcagttcaacagtcatcagtggcttgaaagccttcaaattcagaaatgggctgaacaatgagaacacatggacagagggaggggaacatcacacgccgggccctgtcggtgcgtaggggaagagggaagggagagcattaggacaaacacctaatgcatgcgggtcttaaaacctaggtgataacctagatggtggatgggtgcagcaaaccaccatggcacatataaacctatgtaacaaactggcacattctgcacatgtatcccggaactaaaagtaaaataaaaaataataataaaaataaagaaagcatcacatactttctaggcaattcctcctccccctgtatggttgaatgtaggaaaaaaatatctccctcccacggttagttaaggatcagactcactgttctaatcttgcctgtacaagttagtagctccgtggccctggactattagcctctctgtgcctgtttccttttttcataaaaggaggcaatagcagtacccatcctgtagctttgttgtgaaaattaaatgacatctgagatcattaagaaagaaaagaaaagaaaagaaaaacgacaggggtgcagagatctcagcctggtgcttccccaggcctgcagccttttctcctcctgtctttgtcagatagagccagccactccaaactatacttggtgaaaagaaaacgagcagaaattctctgtaaaacctctggcaacaaaatgcaagctcggaattgagaattctaggagggtcactgaccctctatgttctcctccctccatgtctcggactcctggccggctgcatttcccctccgcctttcctcatcttcccacccaagctgcccctcaccccgtgtcctcaacagcgagctactgtggcatccactctgaccagcaaatgcttcaagagttacaaacactctcatcagcacccgactctgcatctccaagagctgagggctcacagctgcccccaagcacatggcccttcaacttcaaggtccagctgtcaagactaagaaagcagcctgccggggttttgctgcctctaaaagaaagacacagcagaacgtgacccgcgtgtgaccctttgaaaagcgtctgttttgggctaactggacatataaatgcagcctgagattttaaaccaagttatttcatttttaagttgaaattgattccaactagtatcttaatattggtatttagtatatgtaatgttgaataatatcaagcattaatttgatactattactttgtatactatttacatttaactgcttcatgaagtagacagttgctgtgatatttccagtttgaatcgagccctgagcactgagggagcccatctcagaggcgaatggcagcactggaatggcaacttaggatctaattgcaggattctggattacagttttcctgcattgaataactgtctactgaggactgcccagaagcccagtggtcagtccatgcaaagcttccacacttcgtcttcaggaacaaaggcgctgactctcagaaccccgacacacactccctgctgcactctacgcacaccagtagctatttcacagaaaaaataagtatgtcacgtaaaggtatttttcggtttgtttttgggcttcttgatggtgactaacatgcctgattaagaaggacgccacacaaaagcaatctttcctgcggcctgtcagggtacacagggccctaagatgtcccaggggcaccacacagagatgtcctgtcacttcctggccagcacccagcgtgccttcgacagcagcctccctgagaaagcagttccaggcagcatccgccccctgcagctgtcctgaaagacagggaagccctgctgcctgctgcccctgcaggaaggcccagagctctctgcgtctcttgggctgtttccttcacctaaaggctctgctgctgcctgccccgactcctgagggcagaaaagccccaccctgtgtgaaggcccagccccaggagcactcccaccccctcccacagggccgcctctaggcccagcctgcgggccacacaccctgcccccaagtgactgctacgtgcagtggtcatttggtttctttcatgtcaagcacagtggcaggccaggtggaaatcaaggtctctgctccgtgacttacagctggacgatcctggctgctaatttactcactctaagcagagactcagcgagaaccagaggccaccgtccactctgcacctctgctctgaggatgagggcagctcccgcaggtgaagcctctagcatgtcctttccggtattcagtgcacgttggacggcagagcttactagtcattagggccccagagcctgtgctacctagaaacaagcccgtaaatgttggcgggaatggggggtccgcatgtgaggcccagccctgcccatcacaggaaacgggaatcccaggggtcccagaacataagcagatgcgggaaaccaccagagagcccgttcaagccaagtcatttgatttttgtctccattatctcaatttcctacttcacttcgcaggacggtgcttcatcttctagctgaaatcttattactgcgcaacacctacctaagagacaacttataattactgcccgaagtgaaaaattgacctcctcaccaccgccctggctgagcaaggcacgcgagatgcactcgtccgcagagtctgggcacagggagcggccgtgcgcatgccatacgagccaccgctcccgtcccacccaagagctcaggggcagggccgggccctgaattcaggtctctcctaattaatggtcaggccatcagagaggcctggaagtgctgtgccaccaggaacagtagcacagccaagccaggcaggggactcctctgcttgtcccctgcatgaactacatggatccggaccatggctctcggctccttctcactcccagggcagacaccagtgtcatgtggaccagcctatcaccctgggcctcccaagagcatgtgaacatcaccacgtggggaaaaactacaacgcgccaggtgtaaccaccacatgtcaacgacagtacaaccctagccacgaaggccatcaaaggagatacaaggaaatacagccctgatgcaaaggtgatgatgctaacacctgccaaggcccagaggcaacactggttttcagttacattatctctcttacttttctgtgtttcaaaaacctatcagcgaagcaaaagcaagctccatctcccaggcgttgcactaacgcaacacgctgccactccgcactctacgcaggggcagacagaggcaacgagcccctcctcacaagcctctttccacagcactttgaggaccccactgcagaggacccccacattcccaccaccccgagctcctgaaaacactgagggaaatgcgtccctttgttgcagagcctaaggtctcgcaaggacacacctggcccacgggctgaattctaacctgatttcataagaccaaaacccacaaacccgtaatctttttccggaatgagtcatatgccaagatttgggggaacagcccccatgttcaccaagctaccctccagctacatggcgtgtggttttcataccaaccaggacaagcttaggctcctggagtcctcatgctgcaaaaggcctcggtttcaagctctttcctccaagaagaaccacctcctcttctgcccttgtcctgacctcagggcttgaccccttgataccctgctccccaagacacaggccctccctgcccagctctctcgggcaccgtgcggccccccaccttgacgtggtagtgggcatccagcaggatgttcgcgggcttgaggtccaggtgcaggagtggcggggccatgcagtgcaggaagttcatgcccaccgccgtctcgtggatgattcggaaccggagatcccatggcaatggctccgaagccagcagcttttccagggagcccgtctccatgtactccatgaccaggccgacaggttcgcggcagatgccatacacaggcaggatgtagcgaaacttggccatctccatcttcttggcttcttccaaaagctccatgcgctccctgaaaaagttcaaaggcatgaagaatacgcaatggtcactcagccacaaacatggaacagcaccctggccagaagacgaccagctccagagggctgagcaaatgcctcaagtgcacacacatggggcacacttcaatgtcacatcacgaatgcagggctttccagagtctcagtcctgaggctgctgaaatgtacctatgcatcacagggttatcacaagtgaggaggagggaaattctaatcgttttacaggtagcactgataacacatgtggggggtccacgtgtgtgaataattccacaggcagccatgagccaaggcttgggggtctcagagactgcaggtgcaggccgataatcccttctcctgggaggagggaagagaagttgacgttccactcaaggttgtaactaggcaactaggccgggcacggtggctcatgcctgtaatcccagcactttgacaggccaaggcggatggatcacctgaggtcaggagttcgagaccagcctggccaacatagtggaacccccgtctctactaaaaatacaaaaattagccgggcatggtggcagatgcttataatcccagctactcaggaggctgaggcaggaaaatcacttgaaccagggaggcagaggttgcagtgagctgaaatcatgccactgcactccagcctgggcaacaaagtaaaactccatctcaaaaaaaaaaaaaaaaagttgtaactagttatgttcaaggaacccaactcaccttctccgtttaagcccaatacctgagttggcccagttattcctgaatccaacctcacactcaaactaatgaaacagcataggtccaaagcatggggttgccaacagccaaatccaaccagccattttttaaaataaaaaatataggccgggtgtgatggctcatgcctgtaatcccagcactttgggaggccgaaacaggcagatcacaaggtcaggagttcgagaccagcctgatcaacatggtgaaaccctgtctctacgaaaaatacaaaaattagctgggcgtggtggcgcctgcctgtaatcccagctactcaggaggctgaaacaggagaatcacttgaacctgggaggcggaggttacagtgagccgagatcgcgccattgcactccagcctgggcgacacagagagactccataacaaaaaaaaaaaaaaaaaaaaaaaatatatatatatatatatatagagagagagagagagagagagagagagagagagaaaatgtagtcaaatagacataacatagtatttattattttagccattcacaggtgtacaattccctgacattacccacattcacaatgtggtacaaccatcaccactatctacacccaaaacttttccatcatcctcaacaaaaattctgcacccattaaccaataactccttccctcatccccatcctcagtaacctcttttctacattctaggcaaattcatataagcataagcatataaaatttgcccttctgtgtctggcttatttcattaagcatgttttcagggtctattcacactgtaacatatatcaaaacttccttttcatggctgaataatattctgctgcacgaatgtactgcgttttgttcatctgttcgtgggtgcaggccatttccaccttttggctctcgtggataatgctgcacatctgcacacattgggggacaaacgcctggagtcgtggctttcaattcttttcgatacatacctaggagcagaattgcttggtcacagtctatgtgtcacattttgagaaactgccaaatggttgcccacagcgtgccaccaccttgtttgtataaataaacttttactggaagaaagtctcactcattcatttaaacactggctgtggctgcttttgcacttcaaaggggagaggagtccttgcaacagaggccctgcggcctgcaaagcctaaaatgttgcctctctaggccttcgtggagaaagctgaccaacctctggtctaaggtcacttccctggtgcagcctgtgttttcacagactagaatcccagtgcaatggtctgtattggcatcatgggtcaaaagtctcagaatgcgttcagagtaagaggctgaatcccacggacgcacgctggccatgcaggatcgagatcagcagccccaaacacagacatggtagaaagcacccaggaagctggctggaatgctggttcccaggcctcactccttgagaatgcattccaggttggggctggaaaatctgtttttttgtttgtttttcttttttgaaacagagtctcgctctgttgcccaggctggagtgcagtggcatgatcctagctcactgcaacctctacctcccaggttcaagtgagtctcatgcctcagcctccagggtagctgggattacaggtgtgccacactcagctaattttttgtatttttagtaaagatgggattttgctgtttgccagggtggtcttgaactcctaggctcaagtgatttgcctgcctcagctcccaaagtgctaggattacaggcatgagtcaccgtgcccagccaatctgctttctaataatataataagctccctaaaggaaatgttcagaaccacactaggagagatccgacctcctatagcaggaaacccagcagctccatgtccacacacaggccacgcaaggcagctggctggggtggcctccagacaattcccccagaatccagcgtccagcccaagtccctgcctataacccagtgtccgctgccacagcagggggctcttctggagctcggacacaggcctgctcctcccagtgacaaacccgggagcaggtgctgggaaatcactcagtggctcccatttcctcgcctgctggtgaatccaaaacagtgccaacagaacgcatccatttcttaatgatctgaccgcccctgcgagagttcagcccctcctaggcttcccttaccatagtgaaaacactttccctgcaggaaaggccagcaggaacccctggatcctactgtttagctcttgctgtggaaattcccatacatcggacaggtaccaaaggctcggagatctcagcctgtctgccccccaacaatgcaagccctgcagctagggctctgcgtctcaggacatagcccactggttctcaattagaggcaacttcaccccccaagaaacactgggcaatgtctggagagattctggctgtcacaactaaaggatgctactgaacatcctacaatgcataagacagccccaaggctaagaattactcagccccaaatgccaacggtgccaagttgaataaccccgatgtaaatcaagtgagtgcattttcagccaataaactactactgtccagaatcaccacttcagtattcccagcactcacctgacctatattttaagcagttctgtgtattggcaagtgctcgcttgaatccaccatatgtcagaactaaggacaagaggtccctttcccgccttcatggtgtttacgtgtaccctctaaggaagaagatggcgaactacccccaaaagagaagtgtggttgaaaaatctaagcctcttgaaaggaaggtccagggagctatggagaatcaagagagatccaaagtcagaagtcagcataggaaagggcccctgagagaatcgggaaggctgagacctgcgcagagtccaggggcacccgggaggccagcagagcggagcagtcgctgtggatccccttgggcttggcaaagcagagaggggaagccagcagagcacacacactctgttggaagaatctgcaggatgggtccattgactgcatgtggaggggagaagcttgcaggacctctctggagctgcaccaggggtcactaggcagctctctacggtggacgcgggagcaccccaggaggagcagctggggggtgtggggggtgggcaggtcgagtgtgtctgaatacactcaaggagcaaagaatcccactggccttgggaacaagtgaagcaagtatcaggaatgaacgtgaaattattatgagacaaaacttaggggagcacggcctgctttcctagcgctctggttaaatgaccaactaatggaaaacaagatgcccaccagtgtgcagtgctagcctgtgggggtccctgggctgagctgaaagctgccccatcaccagcataccatcggctgcttcctccctctccaggggaaatccctctccctgcagccacaggcttgggccaggctctgggacccatcaagggatggggggtgcagatcagatcgtgggactctcaaccctgtccccagtctcagtgagcattgggaaaaaaggaagacgaggacctgatgccaacgtcaagcatcagctaaaatgaaaccggtcaccaaagaaggaaaatgacacctctcagctcccagcctttctcctcctctgggaacaccggttggctgaggccctcatttgttatttaaaggaataccagcacaacttccaacccggcaactgccactaacttccaaaccatcggactgggacatggtaccagctgctgcttctcttttatgtcttgttaagaatcagagttatgatttgtctgtttccgattgctcaaatgtggccagcttgccgcccctcccctaccagtgtggcctccctcctccggacactctgccccggggcgctggcgaaagtccttccgtaggactcagacccacatccactgtgcaaccgtgtgaggcacaccctcctcgccggagggttttgaggaaatgacaattcgggtgtttagaggccagccattcgcaagggtcatttttccacattaagtagacattctgagagtgaactctctaagccaaagctgactgataataaacacgtattctgagaacaatgtcaatcaaaggaaggctgagtagcttattaagtggaagctctgagccactccacaaatagtgttttcttttatttgcccaaagggcttaatacataaaaccccggtgacttctgattgcagagtgagctcattggcgactctaacagctacgggctggcagcagtgcacacccctccccagcgcaccgagttcagcaagtactttactctccctgccccgggctctttctgcagaacggagaccccatttaccttactttaaaagaaacaacaaacaaacaaaaaagggccactgctgctagttggctcctgaaagcggatcccggctagaatctcctaacggagtccaccccagctttgcgcaactgcctgaagggagcccggcacgacttcccccttccatgggccacacatttgagggcactttctcgaggaaaatcagctgtcctggaaaaaaaaagtcattgtttccgtggacaaaagtgttgtgacagcatgatccaaactggcttggggtagacaggattccagctgaggaagggggtcccgggaccgccctgtgggagatctgaggcccaggagtgggggtggggcggctcccttgcctaccagcctggatttcgctcagaagcaccagcatgtcctcagaaactttccacactgtttaccatccagtaaccactgggccaaaacccacacgaccccgccttccagcccctctccaggtgctccctaggcgcacatctgggaaactccagcggctttaggaagctccagcccttctggggtcgggtgtcgcccggcggcatttgcaattcaataagcctgaaagggcctctttgcaacaagctgcaagaagaggcttttctgatcagggaggttaagaagtgctcaggtactcgaagcacagaaagaacccaccaattgcttttgagcaatggcactattttttttaatacatttttttctcctaagcagtgtttctggcttattttaatgattctggcttattctgatgaccacacaaaaggaactgtagatttattactattatcattttaacacgtggagagatgccgaatccagcctaggtgctggggtggcggccagggagcacagaacatcacacagtcacattcgcaccgtctccaaatcgcatttcttactgttgacagtgaagtcaacgtttctgggttgaccagaagcccctctcgtcggtgttaattaaaacacaacctaaaaactgtgccttgctccaagcgcagctacgcttaggcacagttcagagggggtggcatcctattcccctctccttcgctgctggtgaaagcgttgctaattctgcttccacgcaggaacgggaaaagccccccctcccccgcaaaagtgtcctgggtcctgttttgggttccacatgaaaaatctctgggcattaattaggattaacttggggttcaactttttaaagatacggtgagtagcacttagatgaattcggttttctcctcatttagggctagccaaagtgtatttcgccctcccagggaggccaatggagtagcgagaaatacgagaaatatcatcacaccaatcatctctaaaaggaacttctaaagaagtcccaaggttcttctccaggctcagaaattccaaagacctgtggaccaggccagctgcggtttcccctgcaagcacgcatcctggaaagggggaaagaactgccccgggacatggtcttgtgcaagcggagaagcaataaacgaagggaaaagtgagaagcagggaggtgggggagacggtgagaccgctcaggtaacaaagagctccgaaggagaaacctagcaactaccttcaggaaaatgcagccggaaaatgtgtttcatcatctgttagctgatgcctctcagcgaggccttctgcacaccaatccaattatgttcccagggagcctcggaggggttcccacacggctatttttaaaactgacaagaaacgggcttgtccaatcgtcagctctgttgttacaaacctggggtttgctcaggctcgccccgaccagccagggctgaatgtggcaggagcgtctcccagccggcgccccgcaggcactggcttcttctgagcatccccttagctgggggctggtaggggaggaacggggcctttgggatcactttattctctccaaactggtcacagcacccatccctacaccccaccctaggccctgtgacccccacaatgagggtcagccagggaggccagctgcctctccaaagccaccccacaggaccctccgaggcaccgagccccatgatgaaggtaatctcagatcaatggggtgtcacctgtgaactcccaggagggccccctggcaggcacttcctgtccctgggagcctcgctaagtgtctgggggctgggcggccccccaacctttcctgcacagaaaagcaagctcacatggcctggcgcagcctgctcatcaaacaagccccgagcaggtgctgtggccaagggccggctgaaggcctggcccaggggagctgcagggagccaggagaccccagaccaccttgagaggcaagcagcgttggccagtgaaaatcagcctcacctgcacctgtacctgtggtggctcctatgtaacaagtggactagaccatcactgacccccagcagcctggaagaggcccagacccgtgtgtcaggggtgagaggggctgtccctccgagaagagaagcaagacttaggcagaaggggtacagggccgggggctgcacacaaagaccctaggagaatcctatgccccaattcagggaacatcttgcaaatatgaggggctggggtgggaggcagctcgtcagaaaagcactgagaaatgtggcagggcaagtggcacagcgactacttcaaggcctaggtacaaccttgtgagactgcaatgcaaccagctcctggagcacagtgggactgatgtacattcctaacaagaacctcaggctcaatacagtcaataattaacctaaaggaatcagcttcacaaagagccagggtttgaccaacttctcagaaagatcagccactgctgcacatggcaaagccccaacctactctaccaggcccagcagagcacaggaggtgaaatgcttcctgctaggcgatgctgacctcgacctagccacctgacatgccaccacctgtctgctttgggcagggtaggaaaggcttccagttaaagtacaaaacacttttcaaccaagctatgcaatatcctaagtgatccaccttaagtggagaaagcctccctccaaccaggccacccaagaaataagggactggtcgctagaaataacagaagatcctaaggatgtgagctggtgagtcagtccaggtaggtgcttgtttactttgctcttccaatataagaaagtggtgtgaaaattttcactgatgattaaagctcacacacatccccaagagataaaacgaatgcccctatggagagggttccctttcagaacctaaccactggctggtattcaaagtggtttggatttcatcaaaataaccacagcacccctcctggcctgagaagttcccagaatctgaggcaggggagaaaaagtgcacagcctgggccagcatctcacctttgaactagtggtgatttgatgacactcgtcaccactctactggtgtttccaagaaacactggatttgagggttacggcaaaaagccaccactatctctgctgtgtagtctcctagccaaggacgaaaatgcaaagggagaggacaggcctctcatccacagaggcgtcacagtcacggtatggggctgcagcacgcactgccaccccagacacaggcatcacaacgattctgcagaaaagctggggcttagcggccccatcactcaatcagccgagcattcgaaaccaggtctgccaggcagcaaaggctaaatggtattttaaaaaggtgtcgcttctgagtgtatgtgttcaaggaatctctaggtaaaatacaagcatagcttccatgtagaaggtaagcttcattaaaggataaataattaaaacgtgctaaattgagccttacatatgaaccatcaaaatcaactgtaaacagtgaaatctacaacaacaaagaggtactgttcaagaacattctccctacctctcaaattatgcacagacgacaaccgacccaccgaatttaacacgggcggctctgcgtccttcccattcgtctttgttaccttgaacactcctgctaggtaggtacaggcaggttccattctgacttttggactgggaaactggggtgcaggagggccccatggcacggccacagaacttgaatgcaaggcccttccctagcgggtcggtctcgaaattaagtcagctaaaacgagagtgtgcggcgaggaagcgctgggcggacggatcaacaccccgggccccgtgccggaccccactgccaggcccgagccccggagctccaccgcgcaagcgccgggcgcccgggaagcctcgcccgagccaagccgaagcttccgaccgaaataattacagtcttacaccaatttgtgttccaacgtaaattactaagtaagtcgaacggaggctaactccactcacaaagcccagaggcccacatggcaatttttctaagccctgcgcagaccgcagcgccccggtgggtcccgggcgggccggacgcgcctcccaagggcgcgggtccgaggcgcaaggcgagctggagaccccgaaaaccagggccactcggggagtgtcaggaagcacgactgggcgccttaggacgtccgggcagacgcggcccccgaggagccccagaggagccccagaggagccgcctgacccggccccgacgtgcgcgatcgagcccgggctcgccaaagcccccgcgcccctccggcccggacaggccgagtggacattgtcggagccccgcggcctcgccggcaattggtttcccccccgaagctgctccgggggtgagttcgggagagagaggcaggaccccgggaccagagcaccccgaccccgaccccagcccgggccccagccgccccagcgccccgcccgggccgctcacctgtcgtcgacgtgcaggctgggcgagcacttgatggccagccaggtcttccagtggacatggcgcaccttgtacacctgcccgaagccgcccgagcccaccttctcccagcccgtgaactcgcccgcgtcgaaggtgcgcagcagcgccagggcccatggggtcccgccgtcgccctccatcgcgcacgtctagccagcgccgcggcggctgcccaggtgcccaggtgcgcgctccgccctgttacgtcacttccgtaggtcgtcccgcccccaggccccgcccacttacccgccccccgggcgccctctctgccagcgcccggtgactgcggacggatgaatagacgctgcgggtcactgcgctctcccctgggtgagcagagcttctcacgcttctcacgggtctcgacgtgcgcatcagctgccctgcttttctttgctttttttttttccttaattgcggagtcacatgcagttgtaagaaatcattcactttgcctagtttcccccagtgttaccactttgcaaaactttgccaaaaaaaaaagtccaatctcacaaccaggatattgactttgatacagtcaccgatcttattcagttttgccgttttactcgtcttcctttgcatgtattagttttacacaatgtaatcatctgtgtaccttcccgtatccacccccacctggccactcctgtggcgattttacagccgcaccccggagccctggcatcactaatctttcctctatttctaaaattgttttatttcagaaatgttatgtttagatacaggaatcatacagcgcctaattttttgaaattggctttcttcactcgttagtctaattccctgcaggttcacgtcttgcttttttacacgagtttcctctcagaaagtaactttttttaaaaaattacccaacagcaaatctaaagtccatttcaaatgcaagagttccctcatcctttcctaaataacagcctctttttacaggtagaacagatggtttgaaaaggaaagatttttttttcacatatggggaaaaaaaattcccagccttggaaggatatttgggttagaggccgaagtgcatcacagatcacgcacgcgtccacacctcagaaaacactcactcattcctgagacgcaacggtgagtgaaggcttatttttggccacaggagattaataatgaagacaggagggcggagctaaaggagagggtattttaacgacattaactgtgtttttgtgttagtaactcggaaagagagaggctgccccaagtcagcgcattgaaagccgcagacctagtgtctccaggctcccccttccaaacgggcgcggaccttctttcatagcctgtagcggggagccgcgtctccccactgcctccccactcccatccggccgctctttggagggaactcacacatcccaacatgacgatgcttgctcggggggcctcctggggggaccagggagccacttcctttcccacatactccggaaattaaagttggtctccttaaggctggagtggcaaatagttgttttaagcttgtcacaaatgtaacttacatttggactaatgttttaaaaaataattggagttttgaatctacgaagataccttggaagtaaacatagttattattttggtgggaaaaaaatgaatggacttgaaagtgagtcacctgtcctgttcccggggctcagctctagcaaagtacctttctccatctacagtctccggcacacagctccgcagctgggggtgactaagagcccacaccacgcaagtaataaaacgctccaatttcatttatttaatcatctgtgtgcttcatttgacaaatatttatggagtgtctgctgctagctcagtgcctggtgcctgggactgaagaccagagccccctggagaccaaaagagccagctcccagctgtgagcagatcgggtccaaagatcacgggctcggcggcaggaacctggtttggtatccggctcctctgcggactttgaagtgctttaccgattcacatgacaactggtaaaacgaaaacaaacacctttccaggaattgtgaattcgagttccagaccctctgggattccgggagcgcagctgctatttatgttaacagtcattggtcccaggctggtgaggttagaatttccaagtataaaagtaatttagtttcgttttaaatacattttagggccaaagaaaagtggaacgatttaaagaaaaagatgaaatgaataatagggcaagttgggaggtggctgtcctgaggtttcatgggacaacattaattaacctcatgaagtgcctgcatggacaacgtgcccggtgtggttacaaacaaaccaatcagcacagatcctgggtggaaagcagggcgcagccacggaggcacagtaggggtgcagacttgaaggtttttaggaggtaagccccgagggcacgaagctccacggagagactgttgacccgcctgggagtgcagtgcaggtgaggaggggagggacgacgaggggagacaatggggggtgggaggtgggaaggaggagttggggaagggggctgtctgctgacatttgcaagcccccactcccccactaccctgtgttcctcctggccccttccccagaagaattccaagccagtttcctcctatactggatgtcctgacagcgaatctaaataggtgatcccttgagctccaggtccccaagctgtgcccttcttcatagggggccatttagcactgacccacccagcaggcagcccaaggtccctggtctggaagtgccaggaagctgcctttaacatcctaccgcagggaacaatgaaggttgccggccagggagaagacaggatagagacgtctctgggtttgcagccagcctgcctcagatggggtcccaggctgtgaccatggtgcatttgcctgtccctgacatgtgggatagagggacctgcttcgagatgtcggtggggatccacgcagatgataattatatgtgtgtggcacatgccaggccatgggtgaatagtgagattttcaattgagtcattttcgtctttgtccttctcagggtcctggagcaactcaacccttgtaagtgcatggctcagtgagatcgtggagctgacatagggctgacctggctctcagaggccccagaataaagctggagcccctggggtccacctgctggcatgaccatgggacaggggcgtggagctgagctgggtcagccacctgggaacatagtcccctcccgccaggcctctgcacccagcctcctccctgcttagtaggctcctccctcccctacaacagccactcctgccaccacttgcatggttgtttttgagaattccctccgcattgtgttattttctaaaagaacataacttgttcactgcagagattctgccttcactaattctgacaaagtgatttaggggagacattgagggcctgactcgcgagggctcccagaccacctctgggagacccatctccacctgacacccaactcctcgctcttactcaagcaaatattttctatttacacaaacacttccttatcagagacagctcctcctttgacccattggttccatgagtcttcctgcaggatcatacattccgtgtcctgggaacacagcataaagggtgctgttcagcaacctaggggcttgtgtctgatggcagaagccatgaagcagatgggggatgaattataattgtagtaatgctacgttctaatctgctttgcaccctcatgctccactccatagtctttaaatgtggggcttcttaaaacaccaatttggagcctccctgatcctcccctctttccccaggcagctcatccaggctcacctcagcttccatgtattctacgaagatccctaagcttctgtctgcaggccagacctttcctctgagcctcaaacccccaaaacttaacatggtgcccacagtaggatgtacctaaggcaccgctacccatttgagataagcctatgcttttcacccccaaactggttctttccagcatctcctgtttctgtgaatgagccctttccattctgaaggccaggacagagtagcccatggcccccacagcacactcaatccagtcctgtgtcccagcaccaccctgaccaggacaagaggcaaacctgccccggccccaaacgttaaagggctccagtctgctgttccttggaccttcctgtctacccagtgcctggagtcaattgggccaggagacacccatccccatagatcaagaaagctctggggaccctgaaattcccagtgcaaatgtccctcagccatctccagcccctgcacatgttcatttccctgagagcaactgcacgacaggtgtgagcacccgagcccccaagtgtagccaagagaaagctgcgtgcaagggccatgggcagagctcggcctgaagcccgggatattcacgcatgtgccagtgaggctgttcgtgggttaggacggagctgcaggcagaaagagcgggggactctttgggggccagaagctgagaatcctcagctgtgctctaggcgtgagagtgcatttgtcagtcagaggattgaacacacttcatttaaccctttgttagcttgatgtagaactttcaacaattcagacacgtagcccctaggcccagttattgtaccttccgctggggtccagaagcatcaccacaggtctggtcaccaagcctgcacctcttccatcctgagcctccctgcctgtgactctgtcccctgtgccagtgcctggaccccagtcatggtcactcccatctggtcatgacagcggtcaccctatctccggagggctcaggagggtctccagacatccatgggaccctagccccagccagtgtgtcttgacacggtctagagaaagaattcaggggacaagtggtcatggtgcgaaaggcaccgttttgcttttattgcagagaaagtgggcacctgaaagagagctcggacttgtgtgggagaatgagtcgcacacagtgaagtttgggtttctgattttgtgggcttttctttaattagggggtggaataatcattaagtattttagaaaaaagaggggatttcagggacctcctgattaccaccctttttctccctcatttgggtttgcctggaagcgtcctggacatgtcaccctgacaggggtttcggccgctttctctcccttgtttgggttttctattatcctggggtttctttgcctggtactagttttagctatggtttgggtttttccatcctcccacgaccaccgagtgctgttcctatctcaaccctggccctcttgggcccattcttcacctgcagctggacatctggaaaacacacccctggcctcgctttcacggtggaaatgagcctggcccctccagctccggcctgcagcctttgctgctcctggccctccagccgcctgtcccctgactgggtccagcttggtgctgcaggaccggtgcacacgctgtcctggggccgggaaatctctctcctgacaccactccctgatgcctgcctggtctcccccactcagcccatcatgggtgtctcccccagccccaggcttcgtcacattcctctgttacaagctcaggagcctgtgcacaagttgccctgcctcccccactctcggcttcatggggcggagcaatctctgccccttcccccaccaggcagaggctctccacgacccacccctgcccacctctactggccggcctctgctacccccactgtctctgctgcagccacactgaccctccttgctttcttccccaaaccagcgccctcctccccaggccctctgcactgctgctgcttcttcctggggggctgtgtcgtccctctgccctcactgcttccagtttcatgtgacctctcacagctgccctcctggatgacccgtctaagacagcgctggtcccctcccgctggccaccatccttctgggagccactcaagagtttaggggttacctctctgctgacactcaccctaaaatgcgtggtactattaacttgagtaaatattttggttactcaagggtgagccccacttagagtccctccagagtgccccccacagtgcctcctgagaagtacagcaaatgccgctaaaatcagaggttctctgcacacggcacttttagtacatcagtaatctttttatggcatccctagaccaaggaaacgtccagcggtttcatttattcagtggttaggatccaataatttaaaaaatattgatggaaaaatagtctagcagtttctccaaaagttaaatatagaattgccctatggaattgaaaacaggcattcacacataaacttgtacattcatggcagcagtattcataatagcaacaggcggaaacaacccaagtgtccatccatggatgaatggataaacaaaatgcagtctctgcatgctgcgaaaattcactggatccctaaaggaagttctgatacatgctgtattgtggatgaaccttaaataggttcatatgtattatacagttgtatgatacatttctatcaaatattgtatatggatgttaggtatatatacattcgtacggtccatttatatcaaatattcagaacaggcaaatccacagaggcagcaagtagatgggtggttccaggagctgagggacagagggaatagggagttaatgggtaggagtgtcctttccgataatgacaatgtttttgaattggatggtggtgatgatggttgcacatcattgtgaatgcactgcactaaacgaattgtacatttttattttttaattttttttagaggtggagatcttgttatgttgcctaggctggccttgaactcttgggctcgagcaaccctccttgcctcagcttcccacgtagctacgggtgcacatcatcctacgcagttgaactgtacatttttagatggttagttttatgtgatgtgaattttatctcaactttaaaacaaagttatatcttaacaacttagtagctttttaaaaatgatatgcataaattaaaagaaaaaaatttgtatctcattcttaacaatcgttacatacttatgggatggtttcccctgtccgacactatacaacttctcaaacctggaaatgtcctgtgctgcgctaattttcacttactgcttttagtcacagcaacctccaaaaacccaactttgcaaagatatggcatcgtcagaagaaatggggtgcaatctaatgttgacagtgtaagtagtccggagtgagcagctcacgtggtttctcagagactttgcgggttcctcccaaactttaaaatatcctggtgcacctgcaggagttccctgtgctgccccacagtgccacagcacccagtctgagaactgtaataatacatatatgctggattaaatattataaagttaattcttaaatacatccttaagatgtccatccattgcttcttttccctctctctttttgttttgtaatcaaccttacctttcaaataattttgtaaatatgggccaattccttccttaaaacacccacttctggaagaaatattacacgccctggagaatttctttgcacttactgactccctctctcaacacaggtggatgagagtgggacacctgccagttgtttgcatcagcagacactcagagtccatggaaaaaatgagcctagaggtttttaaaccacaacacaagcaaaaggcacctggtcccgttcctcttaagacagaagaaagaggcgtaaaaccagctccaggtgccacccttaagaaatgttacagtgccggatgggaagagtaaaccctgaacatctcttcttaatactttacagacttcaagtgtattttatggtgacaaagcatattgaagacaaatgaaactctacaaccctgaaaaccagcctgaattattttgagagacagacagtggctgcaaggagaagcgtcgggattttctgggctggccatctccagtgtcactgaccccggtctacccctgcatgtttgtttacgggaaaggagttgaggaggaggatgtatggctgagagcctgaaaataatccagggcaggtggagcgaggagaggactttactcctcacactcatgtaggcatcctgaaaagccacttttctttccaaggtgggcacgggccttgagcttggagtggagccagttaaagttgtccgctctgggtcgtcagatggagatcttatcttgggtcatgaattgtggttttaggagaaaggcagaagctaaacccatcttctgtctggtggggaggcccagcaaagggctcagaaacacagccacaggcctcttgcagcagctggatgcacatttcaggaggttgcctgaaagcagaattgacttcagagagtagggcagcagagcccagccacagagtggtcccaggagccaggaagtgccacacagcccctcgcttatttttactcagtatgccacagaagtcctgacctgttaaaagtgccctttaagaatggctggcccaccctctctcagagggttcatgctggggagagggttcctgcatgcccgctaagctccaaatgacaacccaggtgtagaaagggcttagactttagggttcaaacccatcctagagtccggtccaaggccagttacagccaatgggcagtggtaggtgcagcccagcccattagctcattcttgagcctcagagggacagagcagcactaatgggtgcacaaatggctagaatgttcaccaactcctcgagagtggcattggacatttgggcaagggtcttatggaggctgagagttgactgtgggctcatcacagctattttgagggtcttgacagcccaactagcaaacaattctgcagggatgagaggtcagggcaaagggaaatggcattgtcaagtggacagccaaaaagtccaggatgcccccaggtcctggggaacggcgggggaggaactcagggactggattacccacaggacctggtgagacccacagccacgggctgacttgtgtccactcagaagcgtatgttaaaatcctaacccccagtactttggaatgtgaccttatttggaaatagagactttgaagatgatcaagttaagatgaagtcatggggccgagagcggtggctcacgcccgtaatcgcagcacttcgggaggctgaggcgggcagatcacgaggtcaggagatcgagatcatactggctaacacggtgaaaccccttctctactaaaaatacaaaaaaaaaaaaattagccgggcatggtggcgggcacctgtagtcccagctactcaggaggctgaggcaggagaatggcatgaaccctggaggtggagcttgcagtgagccgagatcgtgccactgcactccagcctgggagacagagcgagactccatctcaaataaataaataaataaataaagatgaagtcattagggtagaccctaaagcaacagagctagtgtccttgtaaagaggggaagtctggacacagacacacacctgcactaagggaagtgggtgggaaacactgggaagatgccacatgactgcagtgacgcagctgcacgccaagtgatgcctggggcactggaagccggggagggttcctgcctggcccctaagctccaaatgacaacccaggcataggaagggcctacactttggggttcaaacctatcctggagtctggtccggggccagttacagctaatgggcagtgctgggtgcagcccagcccgtaagctcattcttgagccccagagggacagagcagctctaatgggtgcaaaaatggctggaatatttcaccaactccttgggtgggtgggtggggggggggcattggacattttgggcaagggtcttcttgaggctgagagaggccaggaaggagcttcccctggagttgtctgggagtgggaccctgctgacaccgacctcaacttttgacttctggcctctagagctgtgagagactaaacacctgtggttttaagccacctggtttgtgtcactttgctgtggcagccactagaaactaatacacccaactagatacgtatctttgtcacagttacaggaatctttattttatccaaaagcaaaagacactgaacttttgtgtacattccaggcctgctgattgtagctggtctataagctcgtgtcggagtctatggtggttgatttttgtgtccctttgactgagccacgaggtatttgatcaaacattattccaggtgtttctgtgaggctgcttttggatgagattaacatgtaaatcaatagagtcaagcaaatcgttctccccaatgcagatgggtttcgtccatgcagctagaggcctgaaaagaaggaaaagctgatcatcctcgtgtaagagagaatctctcctacccaacggccttccagctgggatactggctttttcttgcctttagacttgaactgaacaattggctcttcctggcctcaggctttgggactcagaagcacacattgactgtcctggggctccagcttatggactaccctgcagaaagactgtgggactcgtcagccatcatcatcctgtgagccagttttacacagacacacacacacacagtcgcactctcatgctcacacatacacactcacacacaatcacacacttgcacacacacagacactcttacacactcattcacacactcacatgtgcacacacacagtctctcacacacatcacacacacacacacacacacacacacacacacacactattggttctgtttctctgtataaccctgatgaattcaggatcttaaaggttacctatttcattgtaatgctgttttctagcaccaggctagtccttttgtcggcagaactggtaggctcacttttttttttttcagactgttttgtgttttattttcttccatttacaaaaaagcatttctaagccagggcagtgaagcctgacgctaccgttcacggtcagtgaaatgagcattcgaggatgggactcagcctgtctggacaggtccccagacaaaaaacacagagaatcaagaacgcaggcgctccctgtcggacgccaggccgggccctgtgacaaggatctcagcgctggcggtggggctgccctgcgggttcgaggcctggctcttcctgccccactgcctggtgtgtagcccaggggccgggccgcctgcgccccccgccggggggcacgcccggcccagggttgggggtgtccggcttgcccccagggggccagcggggcctctgttatctcgctccagaaccgacatcgccagccaagaccttcctcgtggagccctcggtctggccaaggacgctccttggagtctgcttagacgcacagcgggctcagctttgccaaattctccaaggagactttccatgaggcgcctcctgccatctgtgggcggcgttgggaactgcggccaccgctgcttgggaatcaggacgtcccagctcccaaccggcggtcattcattccctcaacacacactctgggccgcccgcctggctccaggcaggccctccggggactcgggaaataggagttgttaaacatttctgaaacattcctcttccatttattctgtgattttcttcagaaacacaaggcgtgcacgagtcagcttatcagcttatccttcacccacacgtaggctcttctttccaatcaattttatctttgtttttttctaagaaaattttagggattttacttgtttttgttttgtttttgggtttttttgtgtgttttgttgttgttattttgtttttttttttttttggtggggggttggcttggtttggtttttgcttcattttttaattttagggatttttaaaaagccagcattccttaatcttctgattgttgtgtgactgttgtataatattgagaaatacattcctgtcatccacaactaacaaccattaataatgtgtcgtattgtttacttttttgtttttaactaaattttgctttggggaagtatccatgacgatacaatatagctgtgagatatttcctgtacctgctacgtaacaccccttcatgtaaaacgcagagcatttggtttatccacatccccccgccccccgcccatgcatattagtggtttccagtgctaaagggacagcgccccccacgtgcatttctccaggtactgaggcaggagaataggggctggaggcaggggaccaaaggctgtttcactcagacttcctacaactaaattgaaaggaaaaccctaactttccactcctaagtaacaaaaggaccagaggctattccctttctaaacccccccaccttttcctcgaggcaaatgggaaattggctgtccgcaaccaatcagactgattgtgggtggagtcttcgtttgcacctctgtaccttcgctccagtctctgaacggttgctgtccacaacgaatcagactgattgcgggctcagccttcgtttgcatagaagtataactttgtaacttcaccctagcctctgactggttgcttttggcaccttcatttacatgaggtgagcatgatgtggccaattggaaacttctaggggatatttggacccaagaagatcctgtatccaggcccttgagccgctgctcgggtccgctcccatactgtggagtgtactttggttttcaataaattcctgctttcgttcttttgctgcttcattctttctttgctttgttgggcgttttgtccaattctttgttcaaaatgccaagaacctggacaagttgcagttatgaccctcgaccggtgatagtagcactcgctcctaacagcttggctgcagtaagcctaggcttccagggagagcctctgcacctgctgctgtgctgcttgagttctctcagacaaggaagcatgaaaagggctgcctttttcaaacagcaggggaaggaaaacacagtgataacaaatccaaatattatttcaattgagatcttatcatatacatcatatacacagccatttaaaaagtgaaaacaaatataataaaatcaaattatattcaataaaaaaagcaaggcgcaggcatttacataatgagacccacttctcttaatgtattatatagtctgtaaaagcaaaagatgtgaagcaccccaaatccccatggatgggcgatggttgaattattatcactcatccataggaaagactgccgtgcaattgtgaaaatgggaggaggactgtgtctacacgtgcctctggagtgattgcacagaccactctgaacagagcaaggtggaggaaatcttccatttttccagtacaggcaggaaatagggacccatccctctgtctatctatttactatctttattcccatccatctattatctatctatgtttctaccattcatcatctatgtactacctaactacttgcctacctgttctctatcatctatctaccatcaatcaatctatctctccctatctgcttccattctaaaaataaacagtgtgagcacagtccacagggagggggctggaagtctctgggggaagacacaagtccttgttgcacatgccctgttttctagatttgactatgaaaccatgcaaatattttacatccttataaaacacaattaactttaaaaagcaatgtctaaataccaaaaataaaataagacaaatgaaccaaatgtgtatccatttggtagcctgactaaccagaggggagctattccaattgactttaaaacgtaggaatttaaaagtaactactagtggaaaatgcactaagggcaaaaagaacagagaaagaaaggaaaggaagaaaggaaggaaaggaagaaagaaagaaaggagggagggagggagagagagaaagagagagaaagagaaagaaagcaagagagggagggagaaagaaagagagaggagaggaggaaagaaagaaaggaaggaaggaggggagggaggagagggaggaaaggaaggaaggaaggaaggaaggaaggaagggagggagggagggagggagggaaggagggagggaggcatcttaacccctttcccacaatcacactattggctgagtgttgatgttatcctgagactgccctgtgtgtgttgaagcataaaggaaatgtgatatagaaactctatcattagctctatggtaaagaactgagatttttggcatgagaaaataaaagttaagaagctgtaatttaaaagaaaaatattggccagacacagtgcctcatgcctgtaatcccagcactctggaaagtgggaggatcactcaagcccaggagttcaagactaacctgggcaacagagtgagaccccgtctccccccaaaataaacaaaattagcgaacatggtggcatgcacttgtgatcctggatattttggaggctgaggtgggaggattgctcgagcccaggagtttgaggctgcagtcagccatgatcacaacactgcactccagcctgggcaacaaagtgaaaccttgtctcaaaaaaataaaaaatcataaaagacaaggaaaatatcagcacgaaataataattaaaatcaataaaaatggataatgcaagcattctattaattaggctcattatcataatgtaaatacatatttggggaacttgttcctccaaacagcaatgctctctcttcctcctctacactttatgccaactaattttacataaatgggaaactgtcatttctaccaaagcgagctgcactgtgtttcttggggtgaacctttagggagacagccattgtgagaatgaaaggggaaatatattattgaaagtttacttacagtttttaaaaatgcctatttcctccctgttttctcccaccctccaagtttattagttacctctatccactagcaatggacagattttcatgatttaattatttttactatcaattttaaaagtcagcaaaacatatttactttttaacaatatatcattttaaaagggtacagagttgcagttacataggacgactaagtctagaggtccagtgcagagcctgaggactgtacttaacaattctgtgctgtaccccggaaatttaccaagagagatttcaggtgctgtcaccacacaaacacacaaaacgcaaccgtggggaggtggacatgttcatatgcttgaccgtagtaactttgctgtgagtatctctatcaacacatcatgttacacaatgtaaatatatgccttttttttttttttttttttttttgagatggagtcttgcccttgtcgcccaggctggagtgcaatggcatgatctccgctcactgcaacctccgcctcccaggttcaagcaattctcctgcctcagcctcccacatagctgggattacaggcgcctgccaccacgaccagctaatttttgtatttttagtagagacagggtttcaccatgttggccaggctggtctcgaactcctgacctggtgatctgcccacctcggcctcacaaagtgctgggattacaggcgtgagccaccatgcctggccaccatttttatttttaaaatgataaaacaaaacacattgctgaaccaagaaaagaattgagatgatcgtgcaaataatgatgcatactatatttgggaaaaataaaagttatgaaacagtagcaggtccaagttatatacgcaactgtgtaaaatgtgttctttaaaaatcagggtttctgtgctttcagcaacctacacatgttctgacttgtgatctcaaggtctgggagacatgtgtggtgaaatcacacacacctgccccagcagaggggtcactggacgtcttcatgcgctgcagggaactcagatgaaagggaccttaagtaatgtaacctttacgttagattcaaacatgcctttatgactgctcatctgatttgtaatttaaagcttaagcaaagtatggcattatttaaatgctcatttttaatttgttgaaagaaaagtcaatatttatcatgaagactgcggctcaagcctaagacctatctagtgggaagcaggaccagagcaaaggtctgactgtacgtgaacattttaaatttttttttttgttttttttttttttgagacagagtctcactctgttgcccaggctggagtgcagtgctgtggtgcgatcttggctcattgcaacctccaccccctggattcaagcaattctcctgcctcagcctccctggtaactgggattacaggcatgtgccaccacgcccggctaattgttttgtatttttagtacagacggtgtttcaccatgttggccaggctggcctcgaactcctgacctcaggtgatctgcccacctcggcctcccaaagtgctgggattacaggcgtgagccactgcacctggccaaaattttaattttttaaataaaatgttatccttagactgcctttcctcctctgtttactcttctttacactgtgtgtgtacatgcactggttcacatgtgtgcatgtgtgagcatgcactgcgctcatgggtgtgtgttgaaggccgaaagaacgagggtcgtgaccagctcagcacaccgctggaggctgtatgagcaaacagcaaactgttctcatgaatgcaggttgttggcaaactgacaaaccgccaccagaaggaaccctgagggcagtcacgccccaggcgcagtgtttcttgtgattatctacagccacatctgaagcctgttgtataaagaaagcaattatgtgaacctgtcataaatcaagcagctgaccaatcgttaccttttgctccctgttgattctgcctagtaaatacgaagggctttagaggctcagggcccttgctcactagaagcaaggagcccccgaccccttctttaaaacagatctttttgtctttgtcttcatttctgcgttcatcccccttcgttcagtcctgtagtaaccgtcataggtgtgcatgcacaagtatgtgtgtgtgtgtatgcacatgagactgaacctgagaagctccacactcagctacatcaggggcagcccaagacctgcggaactttccagcatgactcacgtctccccgtcctgcccctatcttccagaacactgccagccagatgtatcttatgtaacgccatccctcatgcagaggacctgcaggttctacacactggcatttgggggccccttgggaaagtgaccagtgaggctgagaggtccacaagccctacccataccccaagaaccttcaggcttgcagagatttgaggaaacctccagtacaagaggtaggaaacaaacagaaaagaaacagacagttcagagattggtggcagagggagagcttcaaatcttcagagaagatgtgtcacccatgaaactagaacacagtgagtaggggacaaggaggaccagataaccagaaagaacgcttagaaattaaaacatgaaggccaagactaaacattaaagagtcaagaagatcgtccagaaattaccacaaaaggggccgggcagggtggctcctgcctgtaatcccagcactttcggaggctgaagcaggtggatcacctgaggtcaggagtccgagaccagcctggccaacacagtgaaaacccaactctactaaaaaaaaaaaaaaaaatgcaaaaaaattagccagacctggtggcgggcgcctgtaatcccagctactcgggaggctgaggcgggagaatcacttgaacctgggaggcggaggttgcagtgagccgagatcgtgccattgcactcccgcctgggcaacaaaagcgaaactctgtctcaaaaacaaaacacacaaacaaaaacaaacaaaaaaacaagagaaaaaagaaaagaaaaacgaaattcccacagcactacatctgcagtaggcactgaaagcctcctgtcctgggagactcccctcctgcctcctggacagtcccactctgcctttgtctcccttctctcctcttagaattcccactagccggatgcctctgccaactgaagctactatgaacattgtgtgtaagtcttttgtggatatatgttttcatttatcttaggtattaggttggtgcaaaagtaattgtgttttttgctgcaaatttctgagttaagcctactgagccgagatcgcaccactgcactccagcctgggcaacagagcgagactctgcctcaaaaaaaaaaaaaaaaaaaaaaaagaagaagaaagcacagaattctcacccacactctctgctcctgcatccccgccagatctgtattggtgtggtgcattcattacagctgatgaaccaaaacggatcattattattaactaattatttaaaattaacatttagggctgggcgcagtggctcacacctgtaatcccagcactttgagaacccgaggtgggcggatcacttgaggtcaggagtttgagatgagcctggctaacatggtgaaaccccgtctctacaaaaaacacaaaaattagccaggcgtggtggcacatgagactacaagtcccagctactcgaaaggctgaggcaggaaaatcgcttgaacccagaaggtggagtttgcagtgagccgagattgcgccattgcactccagcctgggcgacagtgtgagactccatctcaaaataaaaaaagagactccatctcaaaaaaaaaaaaaaaagaaaagaaaagaaaagaaaaagtcatggaaagcagctcaggtgcttctttgttttatcactcccaggaaagtgaggctttttaaaaggtcctactctcagtgatgttccacaaactttatcatcaaagacagacaacactcaatacactctagaaaatctccatgtgcttaaagtcaggtgtaattgaagttaaatgggggccagtcgcagtggctcacacctataatcccagcactttgggaggccaaggtgggaggattgcttgagcctaagaattcaagaccagcccgggcaacatagtgagactctgtctctacaaaaaaaaaaaaaaattagctggcatgatggttcatgcctgtagtctcagctacttgggaagctgaggtgggaggatggctcgaacccgtgaggtcgaggctgcagtgagccatgatcacaccactgcactccagtctgggccacagagggaaatcctgtctcaaaaaaaaaaaaaaaaaaaaaaaaaaaaagaaagaaagaaaagaaaagaaaaagaaatggtaaatttcagagactcttcaaggagaatatgtcaaatagtacttaaagctgttaaggcttccaaccaattcttgaagtccttgaaggttcgtaggaaagtcaaagaggggagaaattgcctggagaaaacggttaacgacgcagggctggatgaggagttagtctgtggattgaagaagtgaaaggttattagacataaggctatcattacctctacttgatctttagaagaacagaacgggaggaaatatcctaaagaatccaacacaaggaagtttgtggacaggaatgctgttggatgattgcgtgaagttgggaaatctctccaacttgtttcattaataagaaaataaatcatgtctggggtagtttagccatgttcttgctcttggcttgaaacaatggttgtcaagttgctgccgggggctataaaacttgatttggtcccgagttgaggaaaaggacgctcggctcagctgtgagtcactggagcctggagccacttgtccacccatcagaagttctcacagcaatttgcacggaaaaccaaagctgaggttaagcctcgtcgagtcagaagtctgactctggctggtgaataaccagttaaaatatttcagctttgacgccacctgaaggcaggtgtgggttgggggtggctaattacatccagagtgggacaaagttccccgggcagctgtgtttgcagccgtgacagcaaacatcgcaaacagcagtcaggagccaggaaagcgattgagcgttttgctgttaccttttaaattaaaaaaaaaaaaaaatgagctgggcgcagtggctcatgcctgtaatcccagcactttgggaggccaaggcggctggatcacctgaggtcgggagttcgagaccagcctgaccaacatggagaaaccccatctctactaaaaatacaaaattagctgggcgtggtggtgggcacctgtaatcgcagctatccgggaggctaaggcaggagagtcacttgaacccgggaggtggaggttgcagtgagccgagatcgcaccattgcactccagcctgggcaaaaagagcaaaactccatcttgaaacacacacacacacacacacacacacacacacacacacacacacacaaataggtccctggttttaaaaacaaaagtctctgcactgtttggtgacacatttgcttgctggttgttttgggaatgttccactgaatcttggagggatgctcttcattagggcccatgcatttccgcctagtgtgcgccatccacgttctcattgttcttctccttaaaagaattattcggcctgagtaagggcctagcagcctctcacaattcccaatttctcccaaagtactgacagtgatccaaaaacaaagaaaagaaccccagttccacaaacatcaaattaaagattcattcagacaatattttgtaatgatattttactgaggccaggtgtggtggtgtatgcctgtcatctcagcgttttgggaggctgaagcgggcagatcgcttgagtcctggggttagagaccagtctgggcaacatggtgaaaccctgtctcaacaaagatataccaaaaaaagaaattacctgggcatggtggtgcacacctgtagtcccagctactcgggaatctgaggtaagagaatcacccaaacccaggaagttgaggctgcagtgagccgtgatcgcaccactgcactccagtctgagtgacataagtcagactctccctcaaaaaactaatagtaatgaatgattcagttttactgacaatgaattctttttattgagaaacctaaatcatctaataatgagataacaattatttcagggggtgactgagccgatgttagtagaatgactgagtatagcacatcgggctattcctcttatcctaaattgatgagctggatatttgaatagaattcttttcaattttatatttttactgatgctttcaagacccatatagtaactgaaaatctaggaacacattttagctctgtttctaaagctctggacactaaacaaatcagtgtccaatctaccaagtggagaaccacctgcagtaaaaagatcttagcttgggagactaagatacgaagatacttagagcatgtgacatgggtatttttttcactgtggtatttactgggagtttccactgttttttaattttatctatcaagcctctctaatagactgtcccaagctgggcaccagaaggttatataggaatggttgggatgtatggggacagtccagggaatatgattgtttaaaaccaaataaggcacagtaatacaccgctagcttctatatttaaatgccaacatgtacccagggggcatcagaatgtactacaattttagacatgagatttacataatgatgtcagataaatgcctttttcatttgctatttccattatgtaatcatcgagcataataaagatcacttgtcataaagaaccattttctactggacagttacattccattaatcattaaggtagcatggagaattaaaaggcttgaataatcatgttttaccatttgctgaaaagggacaacaaatataacttaatgaacaaagttgaagaattcattagtgatcttattaataagagtgaatcattggagatgaggattttcgaggctcatgaagacttgaaaatttcaagtgataattcaaactggatagaacactttcagctattggtttgaagcttcaaagctttgatggctaaggaagtatgtcttccaacaacacctagacccagaaaaaacatggttaacagtaaaagatgttgggagccttttctccccatggttcatccgaactgggcaaattctttctcttatctctccaaattatgatcttaattgttaaatttttctcttagaatacagcatgaataatttgtacaacccgtactacacaatactagttacatggaaaatacaaaccacattttaaatgatttaacattggttataaggcagttccacaattattccccagaaacctatacactgatcttcaattctgtaatctgactcctgggcatttattccagagaaatgaaaactcatgtacacaaaaatattcacacaaatattcatagcaactttgattcagaatagctgcaaactggaaacaacccaaaattgtccttcaatgggctactgcctaaataaaccatagtgtacccgcataatggtctcagcaatgaaaaggaatgaactgttgacacacccagcaacttgggagcatctccagggtggagatgctgagtggaaaatcacaaggtcagaagattgagaccaccctggccaacatggtgaaacccagtctctactaaaaaaatacaaaattagacgggcatggtggcgcacacctgtaatcccagctactcaggaggctgaggcaggagaatcgcttgaacccgggaggtggaggttgcagtgagctgagattgagccactgcactccagcctgggtgacagagggagactctgtctcaaaaacaaacacaaaagaaaaaaaggaaaaaccaatctcaaaaagtgatacatttggtatcttgacgtggggcagataaacagaccaacacaatgatacaccagcattgtatagaatctaatacacacacaaacacacacacagggtataaatgaaatctgaataagaccagtggattatatcaaagtcaaatctaactgtgatctagtacaatagtttttcaaactgttaccgctgggggaaaccagacaaagtataagagatctctctgaatgattttcgataactgtatgtgaatctactatctcagtaaaagttggttttatgtgatctgctatctcaataaaagtttccattaaaaaatcatggttttgggaggccaaggtggacggatcacctgaggtcagaagttcgagaccaggctagccaacatggtgagacccagtctctcctgaaaatacacaaatcagccggtgtggtggcacgcacttgtaatcctagctactcgggaggctgaggcaggagaatcgcttgaagctgggaggtggaggttgcagtgagccagcattgtgccactgcactccagcttgggcaatggagtgagactgtctcagaaaaaaaaaaaaaaaaaaaagcatggttaacatgtaaagaataataccttgatagacaaatataccatattttttaaagttatagaatgtatgattccattttatataacattcttgaaatgacaaaattatagaggtagagagcagatggtgattgcctgaggctagggaatgggggagggattggggagggtagggaatggggagggatcagggaggctagggaatgggggagggatggggaggggagggaatgggggagggattggggagggtagggaattggggagggatcagggaggctagggaatgggggagggtagggaatgggggagggatcagggagggtagggaatcggggagggatgggggaggctagggaatggggagggatcagggaggctagggaatgggggagggatgggggaggggagggaatggggagggatggggagactagagaattggggagggatggggaggctaggaaatgggggagggatcgggggctagggaatggggtagggatgggagaggctggagtgcagtggcacaatcatcgcctactgcagccttgatctgccaggttcaagtgatcctcccacctcagcctcctgaatagctggaactacaggcacatactacacaccagctattttttttgtttgttttatttttttttgtggaaatagggtctcactatgttgcccagcctggtttcaaactcctggcctcaagtgatcctcctgcctcagcctcccaaaatgctggtattacaagtgtgagccatcacacatggcctctcgtacattttataggtctctatattataagtcccataatacatcatctttacttttgcttgacttttaaatatatttaactgataagataataaagtatttgaatctacccacattgttaccatttccattgttctctgtgtccttggacaggtccagattcccacctgctatcaccttcgctctgcgtggaagacttccttaaagagaactcgcactgcaggctactgacactgaactccttcagccttgtgtgtctggaaaagtctttaattggggagctgattataatccccaaaaacacaatcccaaacaccataaccccaaacgctgaaatcccagaagatcaaacctgaaaatcacaaccccaaaagatcaaaatcctgaaaatataattctggaaaaaataatttttaaaaacatttaaaagatattgcagttcagaaacatatcaaaacaggactgcacacttcatagaccactttatacaacaaaataggtgataataataacatatactttgcaagcgtaaacactcaggtaaactaatgacagtcgcacaggttatgagcagatgaaccacattcttttttttttgagatggagtctcgctcttgttgcccaggctggagtgcaatggtgcgatctcagctcactgcaatctctgccttctgggttcaagcaattctcctgcctgagcctcctgagtagctggaattacaggcacatgccaccacgcctggctaatttttgtacttttagtagagacgaggtttcgtcatgttggccaggctggtcttgaactcctggcctcaggtgatctgcccgcctcagcctcccaaagtgctgggattacaggcgtgagccactgcgcctggccagatgaaccacattcataaagaaataggtcaaaacggaaaggtaaaaacacatgtcactatcggtaattgcgcacacccagctttctaactgtggtcatctgaaataccaaacgaacaaagtgtctttcaacaagatcaatcaaaacccccgacgggtcaccactgcatgtagttgcccaaagagccgaaatctggataaattttatctttcacaaatgcaaatgtacaaaaagaacatctcttcatttactgaggaagtttcaacattttctgatgtccaaggcagcagaagaaacgtctgtccaagctctcagagatagaccaacttgccttctgtatttgttctctcgggcaccccagctgattggatggtgcctgccagcattgagggcagatcttgctcacctcgtccactcagacttgcacaataatttccccaggagactcacagacacacccgaaagaatactttaccaggtttctaggtattcttcaatccaggtaagttgacatctaaaattcagtccacatgtgccaaccctggtcaacttggcacacataggtatctcatttgaccatacttaatttccaaataaagacaataagctgatagttttacttaacatgatgcaactatgctatgattgtgattttcaggattttaccctttagggattttgatcttctgagatttcaacattcgggaatattgtgttcagggttgtgtctttcaggattattatctaaacccctttatttggccttcttttttgaaagatatttttgctgggtatagaatttatcctgacagttgctttcaatgctttccctatgttgctccagtgtcttctggcttgcatctccttgatgtgaatttgacgtgtcatcattatctttgttcctctgtatgtgatatgtctttcctctggattcttccgggtttttgtccttattactggttttcagcaatttgattagtaaatgccttaacatagttttcttcatgattcttgtgcttggtgatcactgagcttctcagatatgtagttttatggctttcggcaaatttgacaacattttgctcattctttttttttttttttgagacagagtctggctctgttgcccaggctggagtgcagtggcgcgatctcggctcactgccacctccacctcccgggttcaagcaattctcctgcctcagcctcccgagtagctgggactacaggcgtgcaccaccacaccgggataacttttgtatttttagtagagacagggttttaccatgttggccaggatggtctcgatctcttgacctcgtgatccgcccgcctcggcctcccaaagtgctgggattacaggcatgagccactgcacccggcttcactatttcttcagatatttttttccatctctttcccttttcttccaaggactcttcaaaaactctaataacatatattaggctgcttgaagttatctcaaagctcgctgatgctctgttcattttctccctcttctttttctgtgcattttattttgaatagttttttttttattgccctagcttcactgatcttttcttctgcaatatctgacctgctgtgaatactatccagtatgtttgtcatgtcatcactgaaattttcatctctggaagttcaattcattttgtttttaaaaaactacatctttcatgcctttaacaggtttaattatttaattattcctctagcttttagaacatctgaaaaacagtcataatttctcttatctttgtctaccaattctgtcatttccaagaagatttgatgggttaattttgctccttatcatgagttgtattttcctgattctttgcatgcgtggtcatttttgattgggtgctgtcctgattttgcattgctgggtgtgaggtgttcttgtatctctataaaatatccttgagcattgttctgggattcagtgaagcgtcttggaaacactttgatcttttccacgttttgctatgaagctttgttcagtgggaccagagtaaggtttaggggtcatttctcctcatttttaggcaaaatgcttctgagaactctgcccaaatttccctaaattagagaattttttctctctgcatgctgggaacaggtcacttcctcacatgcgtgcttgtccgtactcagctgagagtcatggggtcctctgttgagctctggcgctgtctctgcacagccctctcctcccccataccctgccctgagaactctggctaccttgtccgtcctggaccttacctttgtctcatcagttcagggactgctgtgccctgccttgtctccctctctgcactgtggcctgggaagtctctccagtccatatgctgggcagtcatgggattcacctggcttgtttttcatctctcagggaccactgtcttcactcctgatggccatatattgtgtctgggcttttttttttttttttttttgagacgagtctcactctgtcacccaggcaggagcgcagtggtgcgatgtcagctcactgcaacctctgcctgctgggtttaagcaattctcgtgcctcacctcccaagtagctgggatcacagacgcccaccaccacgcccggctaatgtttgtattttcagtagaggcggtgtttcaccatgttggccaggctggtctcaaactcctgacctcaagtgatctgcccacctcgaccactcaaagtgctgggattacaggcatgagccaccacgcccggccgtgtctgggctttttagctggttcaagcagaagagttaagtctagttcctaccccatcagggtcagaagcagaaatgtttagatcagacaattgaattgcctgtgtgagcccctccatacagtatgaatggcagatgcaagaccctggtgaggggtggtggcgggtgagaaggaagactggctggcaggaagcagggccaggccctacagacctggaggctgcagaaaggatctgtgggtattcagagagctctcaggatccaagggaggacgctgggcttggtgtgtgggccacactgtagaatgtacaccttcaagggttactgaggtgacggcacggagaatagacttcctgggacaagagtggaagctgacaggcacttaggaggtgtcagctggaaacctggagtcggggaatagtggaggacatggtgaaatatggacattttctttttcttcctttaagagatggggtctcactatgttgttcaggctggtcttgaacatctgacctcaagtgatcctcctgccttggcatccaaaatgttaggattacaggcatgaggcaccacacctggtcttaaaacctggacatttttgcaaacacttggatgtcaaggtgggaagcagggcaagtccaggatgaagctgggctctgagcttgtgtgtttagtgatgacagggctgttggctgagcatagggtcagtggggaagggccaggtttggggccgggccggggaaagggcgtgtgaactctatgagctggacgtgctgagcttgatgatccggtgagacccgcaggtagagaggaattgtacgctttaattcaaggaaaaaatggcaaaatacaaaggacacataggactctcctgaggccagcatgcctcttccagacggttttagataagcagcaagggcagcctctgggtttctagaggctgtttcctacaacatggaggcaggtgcctctctttccttcattaccttgctgtaagattttgtgactaaaactcaagagagaagaaaacagctagtgttcaggtcaagccccaaattgtgatgcaaatgtggtgacgtgaaggaagtaatgtatgcagtggtccatctccaagacaaactgccttgaattggcttaggtcagcaaactacctaagaaacaggatacactagacctctgcttggatcatcaatgcctgcttgtcagcctcccccttccccctttctcccctcccccttcgttgccctcacccaaaccaaagaaatttagtctaagatgaaagtttactagcctgcaaaatagctcattttatctattcgtatcagcgtgcccagctacttaggtcataagtcaaatgcttgaagagcccctgggctgactaggattgcaaagcattgtgggctgcaacaaaatgcagcaggaaaaccctaaaaagacacctaagacccctgcccaacaaccaataggtgatgtctgggaaggttgtgagcccatagtgctcagcctatgaggaactcggggagggacctgcacactaggggatacattgtttgttgaaactgcactgggtgtgcctgcccatcagacacccaatcttgcaagaccatcattaaaagtctcacttctgctgttcttcgggtctctgagtccgttctttgggtttggacggatgagtctgtttctcacagatgcaccagtgttcaggaggaactgaatgtctcactcggggaacaggctatattggcaggagtgaagtcttgggtctggtcctccctctacccagaggtgtgctgagcagtggtgtgtctctagacaggtaggtccacattccaatgaagggtgccttccccatggtctccctctttataaaacacatagaaggcaagcctgtcagtggggaaagaacgggctacttggctccaagacagtctggatgtggctgccatgcttcgaggacacggaatgcgagctgcctgcacttgggaaccctgggctcaggggagccacattccccggctaagggaggagaagctctcagcttcactggaagcaaggcttgggtggaaggggaggccccggccagctttgtccgggcaacccagcgccacttccagatgattctgatgattgcaccgccatacaggcaaggtcactcatccctgtcaggccagaacgaggacccctgtgagaatacactcacaccagatgtacaacctgatggggaagaagccaatggcccgctctgttcccctctctacggagcttgtgcctaatgcttgtgaaaaggccgtattcagactgtgtgcttgtcagttttccaccacactgcatggcttttagcagagcaaatcactaggtggtaatttgcaccctgaaagaaacatgggggcactgatgaatcgaatgtgcatgctaacatgctaacaacatcaccaccgtttctccctgcagtgttctgaaaggctgaaagtctgcctttgtgtgcaatgagaaccacacagggctggcacacacaaggacttgctcacaggtggccaaacgtgaaatgaatgaatcctacttcctggcagaattcattgctggcagatgctacctaaaatacaacaaaaatatccaaggcttggttctcacaggttaaatcctcagaagactggatatgtaaggtgtttcctaactttaaaatgacctagcaggccgagtgcagtggctcatgcctgtaatcccagcactttgggagactgaggtgggtggatcgtttgaggccaggagttcgagaccagcctggccagcatggcgaaaccctgtctatactaaaaatacaaaaattagccaggcatggtggtaggcacctgtaatctcagctacttgggaggctgaggcaggagaatcacgggaacctgggaggcggaggctgcagggagtcgagatctcaccactgcactccagcctgggtgacagagcgagacactgtctcaaaaaaaaaaaaaaaaaaaaaaaacctagcaaattagaatacatcattcaatatttgatcaaaagatcaataagataaggggtcattccagaccatctgcccaaagaaactcctgctgaagtattcgcctctttctagctgtcaatctttttggtgcctgttctctctcaatctaagctttacaaaaaatgctacatgcaccctcttggtggcttttttttttttttggcaatccctgtgaaagcttctgatacctcaatatctcagggaacatttcaaataatccaaacattttatgagttctggacctgagaggaatcaagatgtggctgacggcaggaatcgtgagcgttctcaaagtatatgaactgcaccaccttccctaacaggcagcgggagcagaaggccagcaattgaaaacacgggtcacagcaccttttattcgtcatcatacaacctgatgtgacaggaaatacagccaacatctccaaacagtcttaatgcctttcacaatccaatgggaaagcccaagacgccgcctctagtggggaagccatgagccttccgcctttggatgccacaaatgggaacgatagaggtacaggaggtctgccttccacgccggaccctccagcgcagtcccatgccggacacagcgaggcggcacttggcacagaacgttttcctgagaacacgtcacacgctagagcattccagaggcccgagccccttctcaacccacagaccaggattcacggggagcagctgtacctgtggcctccccgcaagactcacaccagtggatggcactcgagtccacagctgcacggagccacgggtccaaaacgaattctccactgagatgggtccacagagcctggtggccacaatggctggatctaatgtcttcctttatgaatacatctgtgcacctgggatcagttaaaaaacgaaatacttcctgtcatgatgatcaatatgcagaactgcgtataggtgaggactcttctgcctgggtggtacatggttgttgtattttgctatctagtttctttgatgcaaatttgtagcaattgctttaagacaacccattttgcctcagacagtgaccctattaagaccacgtatgtttacagaaaacttgggagtttgatttttctttagagttctcacttataacaagaagtaagaggtgtctgtgtattgagataaacagtggtatataccacacaatctaaattaggttctttaacaacatttgatgcggtcttactctaggcactaaaacaacttctttaaaaaaataaaattgtgatttccaaggcctttattttatagggaagaggaataaaagatcaatgctagtgggtgtttcgtcatgagcccaaagcccgttgggagtctctgcgaggtcatttgccctttagattctgcaaaggcaaaaagaaatcgatactgatttttaaaaatatatcttaggagccctggtctcctgctgattccatggatgcctggagcacttgtatctggagaatggagacaatatcaccccaagcccgaattcatttgatgagactactatgtataaaacagttaattatatacataaataacataaaataattctcataaattaaaagtcaaatgatctcccactattcattcaactgagaggtgagagctaggcgcgagtgatggtgggtaaggtgaggaggtgagccccacagaccctcctgcatgctgcctggggatgaacattccttagttcatgaaggcatatattgcacaaaacaaattccagccctgtcctcaaaagtctgctgtttggagtgaagtgctgagaaagttgcgttttgaaaaacacaatcatcctttgttctgctggcaacatcaggactgctcctgatcaattactcagccatgccagtgtttcctcaagatggactcccagtgagtgcaggatctgggataactggcaaagcaggacaccttaaggcaggtttgtcctctcactgtggccacaaacagagtaccaggaaagttaagagcaaacttctccccacacctctcagtgtttcttgtcgtgggcagcaggagggctgggtgcctcccccaaccctggcccctgcccccgaaactggtacacagacgtgacagcacgtgtccccgcacacgcagacctggctgttcaccgcacattcagttttaggggcaattaatgcttctattagtgaactaacctctctgctttcattaccacctggcaggaaatagcattttctctgtgtttcagaaatacctacacttttccattgtaaagagccaaactcattcaatatttttatagaaaactggtcatgaaatacaccaacctttggaattgaagtttaaacagaaggaaaatatgacttttcccccgtttcttccactcgggattctggctgggcttcagccagaatggatacatttggattgcagagaatcctgagacaacccggaggagcccctgggggcagcagggaggctcactcctcacacacagccgcgcgaccctctgcatctgggcagctgtgaagggtggacagggacagatggtcctacagtgcacatgactttatcatgttaacataaaactaaaacacaatattggccataacagtcttgaacacataatgtatgtttgaaataaagttaaaaaaaaaaaaggaaaaaaactctattggaaatcgattcatggatattactaagatgcgttttgagctggagtcagtgacctcacgtgaccccttgcacatgatgaccgtgatgacctcgaaggttgcaggatcaggtgcggctcagcacgcctcatggtttcagcccatagttgtataagaaccgactccactcctagttcaaagagaatacacgttactttaacttctatgtgctcgcttgcaaaaaaatccagaagtgaggagaaaatgttccctgctgcctgctgccacctgtgaatactgtctgtgttctcataggaaccgagctctaaaagaaaaaagaaaatgaaccatttgtgttcctaataacttatctcctgcctcttaaaatcctgcttctctctcagcttcactttcccgaaccctgtgtcgggcgaacactggttctgtaaggggaggcagatgcggccccggcccaggacttactgccttggtaaggcatggtgtggagccccatccagtttaaaactctggcctgccagaggtcccttctagagttaagctgacagaccgtaatggttgctggcgggggatctggagatactctgcaaagctaagtcaaccttacattgcaatgtatgactttttgtttgtttggtatccagcaaacacatctaaacaaatcccaaacatccctctgcagttcttgccccgagtctcccggaacgcagctcagtagctgtacatctgctgctgctgctgctccgcctgcacctggggctgggccgcctgctgtgggggtgcctgcggctgcgagggtggcaagacgtcagtctggggcactgcccgccacgtgagcgggtgctggtcactaagctggctccccaggggcgtgatggagttgaccagggtcgtcaggttgatgaaatgggccacagactgtgggttcgaggcttccggctgggggtggatctggacgtcattttggcggttgtgcaacatggcagagccgctgacggtatcaaaggtcacggtcaggattgagttgtccagctgtaactggcgttcaggggtggtaaggtgccccacggccaccggctggagattggtaaactgagtcgcggccgcagtggtgatgggggtcacggtgatgttggttaagccgactgagctcgatggtgtggtcacatttgggtcacccagggtcaccactacctggaagattcacacacaacaaaaatccgttcatttttgcaaaatggggaacgcaaggacctccccaggatgcgctctgtgttaccacaccaaagaagcacgacattctttggtgaaagaggaaaccgagttaattttgttctggaaaaattccagcgagaaacaaaaacaagaaacagacacaatcatgaaagcaatgagaaggaactaagaaacaaattaatttcactggctagaaaaaaatagaaaaaagtaagcacgaaaaagacggaaaacagatgcttccttttctatccattcctctgaagtgccctgctgttggtaaatgaaaatcccaccacaaagctacaaagagcaataaaggtatttgcagtaccaatcgctaataagagaaagcattctctttcatggagagggatgaaaggccaaataaatgaggaacttttgcagtcaagattaccatcccccaaaacaagagagagaagtgcagtattagacacagactgatcaaacactcagaggcttcaaaagcaaaagtgacgaaggctgagcaagacagaaggttccactcgagaaagtgggattgtgggattgtcttcaccttccagactgagggatccttgctctccggctagtcagcaaatgcacagggctgagctttcaccataagggcacttgggtaggccacccgtgacctccccaaactgcaaacagcctacctaattgccacccgggcagggatatctctcttcaacatgctagaatatatgttgctactaacaatgacaagcatgatttgtaggtcagaactcagaaatgcttacatgaaacatgcttaagtgaaaaacagaatgtctgctgccttcaaccacatgaagtccacatgtacactgtgtatagtaaaaagagatggagtcacacacacgtaaggctctcatgcttagggaaagtgaccggcacctaatcagaacataaagcagcaaactgacctgctgaatgctctgtactgcggaattggtctcgtcgcctacactgcctgtgaactccgtctctttctctgagtattcgctgaaggtggcgtcctcgggcaccggagcacccgcctcctcttctggcttctgctttctcttgtgacttcgcttggcagctttcccgtgcttcccttcggccaaatcctcctgctccagagtcagctcaggctgcagaaaaatcggtttcagccgagaaccaggttagtcggtcacgtcaggcagcggccagggcagccccagcactgccctggacacactctccaatcagtggggacgcttgtgggccaccgagctgccacaagaaacagtgaccacagctgggtcttgtatttctaaggatcggggcaagttcctttagttgcagatttaaaaaaaaaatacatgcaagtcatatttttaaaagttgtattttatgctaaaatgtaaacacttcttagaaacttaacgttttaagccactgggtatttccaaagggaaatgtttctgcccgggtgagctgctagagcaaggctgaaaatgctttcaaatcagggctctctcttccccagggctgagacgaatccaccataaaaaacaattttgaattaaaacagatttgaccacaaaacctgcagggacagggaacgagggcccagctgcagtggtgagcccagtgggcccctccccgcacgattccctgcaagtgtccaggacactgctgggctgtgaccacatcctctgaaccgggccggctcaccaggctcgctcaggctcacagaggccgcggggcagtggtggccggtgagtggtcacctgccactcctcttgggcttcctgtgccattccacacaacctgatcctaacccagtggcagacagacccagcgtgggcctacaccgctgtcatggtgggacgacccgtcccccccatgcctgtgacttgccaagggtagaaatggcctgtgggttctggggctggggctggagccgccgtacgtcactcagccggacccagtgcccttcatgaagactgcactctaaagcgctgtttcagaacgagaggcatacatgtgatcttagaccactgagagcatggcacgttctctttgaaataaaaaaaaattttgctaactgaaagtttagtattaactaaaaatttctttaaaaactaagttcatctaattggtatgtttaaacttattttgcttagaacattttaatgattgttctgatttttttttttttttttttcagacacagtctcgctctgttgcctgggctggagcgcagtggcacaatctcggctcattgcaacctccgcccctgggttcaagcaattctcctgcctcagcctcctgagtagctgggattacaggcgtgcactaccacatttggctaatttttgtacttttagtagagacagggttttgccacgttggccaggctggtcttgaactcctgacctcaagtgatctgcccgccttggcctcccaaattgctgggattacaggcgtgagccaccgcgcccagccaattgttctaatttctatttttttctggaaaacatctgttttccaaagtgagatacaccagtattcaacaaactgaggtcacagaaactacagaaacgaggagatgatctaagaggttctgaggggaagagaagccaagaaaacagggtaacctggccacaggcttgcccagagctgctccctcccggcctgtccaagcccctctggtcccttctgcaggtgtccacttaccccaaagtttctgagcccctggggccccatgctgctcacctggacgatgccaatggaggaggcgtcgatggtggtggtctccgggaggtggtccaggtcatcgatcctcaccgcgagcacctatgaggagcacagggcatgagctgggggtcagggtgctgctgatgcaggtgggaacccagaagccacacacgccttgggaccacctccaccactcctgcccttccctcccaggcatcccccgcacttcccagtctcctctgttcagctctgactttgaaactctgtgtccagaagcccagggcttatcctcaccccttatttcatgctcccacaatggtcttgcccctgtatcatctcacgtccactcccccagtggggagactatgtcctccctttttggccccccaccaaaggggtgaggtttcagtggcgcttctgttatttccaagggagaccacagcaaggtaaagatacagtagagtaaacttgttctatgagcaatcaccaaaaatgagacatttgtgccttacacatcgtacttttcagttgaatccatacacaagtgctttcatttgttggttttgtgatgaagtgacgccctgcccctaccttccctccaatggccccactgaacggggtcctcagcacgccccatgtgtccacaggggccctcccaccagctcagtgcgtcctgcccaaaagtgagtgaccttcaccgcccacaccctgcttacagcagttgcgtttgttcctgtgatgacctaattagatcataagaaagacaacggacaacgagtacagagacagccgaacgtgataaaggggaggggctgcaaaacaaaattagcaagagtctgcctgtaagggtgcttcacccaaacagctttgcaaacatctttaaatttctgatcaactaaaggaagttaaaatgaaaaagcagactatgctttgtggatgtaactcatttaaaaaaggagagaagtgcatcattaaatttacattccatgactaggtctgggccccttcctggaaaagatggcaaacaaaggctggtctgtaagtgttttaagttaacataaatcctgcaatggctttgaagactccagtgtaactctcattgacactgagcacagatctatactgtgacactcgcaaaggaccctgagcaaaagcaaccagactgctgtggacgcactctctaccgtcaccaccatcaccaccataagcaccaccaccaccatcatcattaccacctctatcatcagtatcatcaccatcaacaccaacaccaccaccaccaacacaaccacctccatcaccattaccaacaccatcaccaccaacacaaccacctccatcaccattaacaacaccatcaccaccccctccatcactatcattaccctcatcaccaccaacactgtcaccaccatcatcagtaccactaccaccacgtggcatcaccaccactgccattcctatcaccactatcaccaccaccaccaccatcaccaccaccatcaccaccaccaccatcaccaccaccatcaccaccaccaccatcaccatcaccaccaccatcaccaccaccaccatcaccaccaccatcaccaccaccaccaccaccatcaccaccaccatcaccaccaccaccaccatcaccatcaccaccaccatcaccaccaccaccatcaccaccaccaccatcaccatcaccatcaccatcaccaccatcactaccaccatcaccaccaccaccatcaccaccacccatcaccaccaccaccatcaccatcaccaccaccatcaccaccaccaccatcaccaccaccaccatcaccatcaccaccaccatcaccaccaccaccatcactaccaccatcaccaccaccaccatcaccaccaccaccaccatcaccaccaccaccatcaccaccaccaccatcaccaccacccatcaccatcaccaccagcaccacccattactaccaccaccatcaccaccatcaccatcaccaccaccatcaccaccaccatcactaccaccaacatcaccaccatcaccatcaccataccaccaccatcaccaccaccaccattactaccaccaccatcatcaccaccatcatcaccaccaccaccatcaccaccaccatcaccaccaccaccatcaccatcaccaccaccatcaccaccaccacccatcactaccaccaacatcaccaccatcaccatcaccataccaccaccatcaccaccgccaccaccatcactaccacttccatcaccattaccaccatcaccgcctcctccatcactatcattaccatcatcaccaccacgactgtcaccaccatcaccactaccaccgccatcaccatcagcaccactaccaccatgtggcatcaccactaccatccctatcaccactatcaccatcaccaccaccatctccaccaccatcatcaccaccatcaacaccaccacctcccccatcacctctaccaccaccatcaccaacaccaccatcaccaacaccaggtcccccatcaccaccatcacctttaccaccatctccaccactacctccaccaccatcacatcaatatcatcagtatcctagtcacacagtctgaaagctgacgccatcaaagaaccaccatagaagcattagcttcactcttcttaggatataagaaaaaagtgaaaattgctttctgtgttttgtttttaatgtaacattcattcaaagtaaagagaaaaaccatagcttggagtcataaaatagtatcaatcctaaaagattctgaatctctgtaagtagtttatgcctgtttaactagtccaacagttaaactataactagtttaacttaactagttaaattagtgtgactccaacgaacaccttcttcctcctgaatctgtggcatcaccaacggggacaggctcgggggaccgttatcccactctcagacagccaggcctcactgcggtacacacacagctacacaaagctgacccgagtccccttccttcccctcacactgctgtctagggtcatctcttccatatcctctattctagtttgtaatcactttgcctctgtctacttcttatttttctgtctcctacccagaccgtaaagtccaggagggcagggatggaccctggctggccggcccatcacatcactggtaggcatttgtttgagttaatgtagagggaaacaactgtgagatgatcaaaaggaatgacacaaagagagcacaggataaaaggctggagaaacaaattggttcgagaacaaagacggacaaaatccccccgcaccaccttccctgggtctggaaggctttcctcttgagtcacttggttctgtccgggttgggcttgaggggagtggggatgggcaacacacagcccagttgaaggagcagagcacagaaggcgaacttgcagttgggccaccttaggaagtggtttaatcctggtgagaggactctgcctgacagtgtttgtgggagatgtctttatcagtaaggcctctccacccagctatgtatatcaaaactccggtgtacaaaagtgatgtgcaccgtctttatcaatacgcggaagtctagaaacccacacgtcatggagaggaaccgctcaaacgccagccttgctcacgggctgctgggtgggctgcagggcctgccctgcccctggggtgccaaggtggtcctggcgcttcgggttcctactcccccgactctgttttctaggtaaaaacaccagctggccactacatgagaagggaggcaatggagctcagttagagggatccaagctccccgctgagtggggcacagggcagagtatgcagccacggtcccctggcttcccggactggagagcaggttgagtccctgcatctccctgggagcctgatcgggctgcagaggaacagcaacacggcgacgtcccgggtcacccccaaactagggagccaccagactgacacctgaggcagacggtgctttcccaattccaaaaggaagtcactttcattacaggacattggaaaatggagaaaaatgtgaagacaagaaattacccatcacttcaagaacaagagagaaatcactgtgggatgttttgctcccttctttacctacctcatttatataagtgagtattatatatacacacaatgtatgtgacgtgtattgtgtatacacacattatatatgtgcacaacgtatactgctctttcacgtacgtaatgagcatttcacaatttcagatccgtgtaagcatgtgtgtcaggcaaacacactgctaaactatcactaattgaatcacgttcttattgtagggttggaataggggttggaataaccatttattaaacactcgagaaatgctgtgatgctgccttcaagaaaaacatccaacggtgagagcggcaactcgtgccagccggccagtgtggtcactctgaatctaaaaccccccgcccccgcaagaggcgaaggatgccatcctccgccgctaccgtttgcttttctgggatgcgcggtgagctgaacgcctttccgtgtgtttttcaccacggctgttcttcccgcatgagctccctctccgtgtacaccctgagtgcgcttcgcgtgtttctcagtgagtgcttgttatcactaatgttaacaggctctatctgtctaacacagccatggcctatgcaaattttttcttttttttttttttttgagatggaatctcgttctgtcacccaggctggagtgcagtggcgcaatctcggctcactgcaacctccgccgcctgggttcaagcgattctgctgcctcagcctcccgagtagctgggactacaggcgcccaccaccatgcccagctaatttttatatttttagtagagacggggtttcaccatgttggccaggctggtctcaaactcttaacctcgtgatccactcgcctctgcctcccaaagtgctgggattacaagcatgagccaccgtgcccggcccagatttttcatttttcctttggcctgtatttgttctgagtgcttatggagtcaaacctgtgttcacaactccttttgctgcttttacgcttagagagtctactcttttctgtgacctgacaactaagttttcctctggttttgtctttcagggtgctccttcttaaagcacatttaattacggaacatcctggcccttcctgtggagcaggctttcagagcagttgggctctgcctgcgtctgtacaacttccccctccccatcctcggtgtcatactttacttggccccaacaccacgtggagcccccattttgcacattagttccatgagtgggaagaatggggggagtggcagggctgtgcttccatcttgccataatttcagggaggacgtaatttataaccttagcaaaggtccgcctgaggctctcctaacctctcgcagccactcactcagtgcctcctgtgtggcaggcagtgccagtcacagacgcacctaagactcagggcctgcctccagtactgggggtctgcagagggaggtgggccatgtgccagcatgggggtgtccggtgcgcggcccgctggcggggcacggagggggcacagccaccagctcacctcggggtgcttgcgccgcatgtgtcggctcatggaggccctggtggacaccttggtcccgcacagctggcagctctgcgcctccaccttgtcgtgtgtgagctgaacgtgcttctgcagcatgtactcggtcacgtacttcttgtcgcacacggagcacgtccactgcttgcccacttttcacacacacgcagacacacatgcgcgtggaaaggaagagacacgcaggtcactagtgcagccatcccaatgaccctggcctgctggacgaggcaagaagcctgtcacgccccgcccatcctgagagggccggtgctggtccccgagcacacatgagcacagagcctctgtcccttggggagcactgccagcagcagctgcatcacggaaccaatatgagaaaattcaagaagggatacttgaaagctgtggcgggttgaccttcagaggccaaggggccaccatgaagccaagacaacactaaatgtgctggaaccgtctagataatagaatagtcgtttccaccccagcaggcactcagacagccccggcagcctgccgcgtgcgccccgaaggctccttcaggctgcgccgctcacctgtgtggatgagcttgtgggtctccatggtgttcctctcgctgaatgtcttcccacacaattcacacatgaaatctttaatccctgcagagaaaggcgcacataacttcctacgtttaatgagtgttgtaagtccacatcagggcatgtcttctccctgacacgttccaggcactgtagggccttcaggagaaggtgaattgcaagaagacagcagacaatgaacgctcatccccagcctcggccagcaaagtgtggcttggaaagtttatgcttccatagtgacatttcatatcaaaaaaacatgagatgtgggaaaggctgtctgaaaacacagacagaaagtggaacccacatgtggacaagcagaaaaacgataggaatttctttaaagcattaatgtatccacacctcccttagtccaggaagctcttaggcagcacatgtgatattacaatgagagaggaaatggtaactgaaatcaggaccaatggcaaggaggacacagacgagccaagcgtaaaagacaacagaactgccgtgctcggacaaaatgagtgtgattcttcaaaacttgactaattcaaatgagagctgatgccaggcacggtggctcatgcctgtgatcccagcactttgggaggccgaaggaagatcgctcgagtccaggagttcaagaccagcctgggcaacatggcgagaccctgtctctacaaaaataaaataaaataaaataaaataaaataaccagccgggcatgatggtgtgtgcctgtagtcccagctactcgagaagctgaggtgggaggatcacttgagcccaggacttcaaggccgcaatgagctgtgatcacatcactgcactccagcatgagcaacagagagaccccatctctaacaacagaaaggtaaattagagcttacctgactttttttttttttttttttttgagacagcgtctcactctgttgcccaggttggagtgcagcggcgcgatctcggctcactgcaagctccgcttcccgggttcaggccattctcctgcctcagcctctctgagtagctgggactacaggcacccgccaccacgcccagctaattttttgtatttttagtagagacgggctttcaccgtggtctcgatctcctgacctcgtgatccgcccgcctcggcctcccaaagtgctgggattacaagcgtgagccactgcgaccggccttgactttttaaaatatttgataagtactcagtcagtcctggctcatggattggcctcacgggagccagaagcggatgctttaatagaccaacaccagaggtggcaattgctcccgcacggccactcgtgcccacggattctaagactccaccttccaagggaggggccttaaccccccagagcctcccagagtagggagggtccctccccaggtccagggacaagaccaggaagtgtcactgttttgttgcttattttaaggacacttttgattgacatcaaactcatagacagaaaaacacaaattgtaagtgagtgcgggctcaacaaatttccacaaagtgcatgaacaaaataaccagttccctgattactagggaaaaagaaccagcatagccatcatcgtgacattcccaggatcaggaggtgcacggtaggtggccttgtggtggaaacaggtttaattagagcccggggggaggcgtacagataatcctgttaaaatctgttattttatgtatgaggaggctgaatctcccaggacagtctgtggaacttgagagggtgaagacgaaaaggccggcccttagcgactctgattgagagagtctgggaaagaaaacccaagcctggtctttagacaaagcctctcagatgattcaggacatccaagagcaagcatccccaacagacggccacgtgaggaaagttgagaggacattcctcagaagctaaaggaccccaaaatgcttagagaaataagacaagctgtgggccactgccctgaggaacggccaccgccttgggaacagccactgccctagggaacggccactgtgggggatgatcgccaggggagaactggggagtgtgtttgtttcaccagcccagacaccttgctctgacggctgtcagcgccccaccaggcggcacaggacccgtgttccccggagcgaagggaaacgtgtggcacgtaattatgtatgtggtccacagagagggagacagggaggaggccaaagggggaccagcttcctcctggtgcaagtgctcacatcagctcacgtctggggggctctggggggtcaggggcaagcaagaatagagtccacggtctgtttcaccccaaaaactgatggggaggtggaccctatgaatgccctttaaacaaaggttgcccctcaaaatgggaacaagacaagtaatttttaaaggcacttaactcagtcctgagggctcactgtggagcatgggacagaggccaccacagcccagcgagttggtgggcggcaggcagagtgtggggtgttctgagaacccagatgagggcatgtggcccagtcttggggagcaagagtatcccaaaaatggtaaagcatatactggacagagattccccaggaaagagatggacagtacacttctgcagtccaggggcagaggaggctggcacgcccggccaacccaaagcagacccgtgtggcaacccgcgccactctggggagcaggggaggaaggtaggcaggtgacgtgggctggataaaggcaggacccaacgtgcagttgaggggcccccagggggcactgaacaggctcacgccagggaacttcacgctgagacacaactccaccactcagggacaacctctcaattctgatgtctcaattttctctccacaagcacaaaaacactcgcccatacagaagggttttatgagaatggccttgtattggcattgcgcagggtgctttagtgttttataacaatgctttgtgttagtgattgcgcagggtgctctagtgttttctaagatcttggccttgtgttagtgattgcgcaggctgctctagagttttatgagaacgccttgtgttagtgattgtgcagggtgctctagtgttttatgagaatgccttgtgttagtgattgtgcagggtgctctagtgttttataagatcttggcctcgtgttagtgattgcgcagggtgctctagtgttttatgagaacgacttgtgttagtgattgcgcagggtgctctagtgttttatgagaatgcctcgtgttagtgattgcgcagggtgctctagtgtgttatgagaatgcctcgtgttagtgattgcgcagggtgctctagtgtgttatgagaatgcctcgtgttagtgattgcgcagggtgctctagtgttttatgagaatgcctcgtgttagtgattgcgcagggtgctctagtgttttatgagaatgcctcgtgttagtgattgcgcagggtgccctagtgttttatgagaatgcctcgtgttactgattgcgcagggtgctctagtgttttatgagaatgcctcgtgttagtgattgcgcagggtgctctagtgtgttatgagaatgcctcgtgttagtgattgcgcagggtgctctagtgttttgagaatgccttgtgttagtgattgcacagggtgctctagtgttttatgagaacgacttgtgttagtgattgcgcagggtgctctagtgtgttatgagaatgcctcgtgttagtgattgcgcagggtgctctagtgttttatgagaacgacttgtgttagtgattgcgcagcgtgctctagtgttttatgagaatgcctcgtgttactgattgcgcagggtgctctagtgttttatgagaatgccttgtgttagtgattgcgcagggtgctctagtgttttatgagaatgccttgtgttagtgattgcgcagggtgctctagtgttttatgagaacgacttgtgttagtgattgcgcagggtgctctagtgttttatgagaatgcctcatgttagtgattgcgcagcgtgctctagtgttttatgagaatggctgtgtgttagtgattgcgcacggtgctctagtgttttatgagaatgccttgtgttagtgattgcgcagggtgctctagtgttttataagatcttggccttgtgttagtgattgcgcagggtgctctagtgttttatgagaacgacttgtgttagtgattgcgcagggtgctctagtgttttatgagaatgcctcgtgttagtgattgcgcagggtgctctagtgttttctaagatcttggccttgtgttagagatggcgcaggctgctgtagtgttttataagaatgtcttgtgttagagatggcgcaggctgctctagtgttttctaagatcttggccttgtgttagagatggcacaggctgctctttgacctgtcgcgtcaccgactcctttctatgcacatcagcgtagtacacacatcacccgagcggacaccttgctcttttctggattcaccatggcttagccagtgccctaccgaggccacgtctgaccttccagcgccttccctaactcaaaagatgacaagcaaccttgcatgcacatccctggcccttgtctggtcgctatttcttgtgcacattcctgagggggaaacagctgaacgggaggaacatttaaagactgaccagtctcccaatgccggaagtgagctgtgcagcatgctctccggtgacgaggcccctgtgggagggggaccttttgagatatgcagctgctcaccccggccccaggaagctctcttggggaacccggcactcagtgggaatcacaaagaggaatcgtctcaaggcggctctctcttctcccacggcccacctggcttccctacacagtgagcgccgtggctggcgcggcccgggcctcggactcacccgtgtgccgcttgcagtgcttgagcatgttgaccttctgcgcgaacctgcggtggcactccttgcactcgtactccttgatgcccttgtgcagcttcatgtggtggcgcagcgcgtgcttggtcttcatgccttcaaggacacagcgagtcagaggcggccacacccccacgcagcccacctgggggcccatgcccgagaccctggggcaggcacaggcagcggcccgtgcggtactggtgagggtgtgggccggcccccgaggatcccggtcagtccaccagcggtgagacctgggaagtgactgtgcccagaggccgggagggactgactgcaacatcaggttcactcactcctgccagggcctggccgagccctgaccacgcgagcaacgccggggcggtgggtaaacttccctgcgtgcccatggcaacccggcgggagaattcggtgagagatagattaatacaagcatgactaaaggttcccttcaaccttgacaatatgagtggtgattgggattcggacgcgagatggtttcaatctacctgtaatttaagaagccaatcttaagaagctgaaatactccaaagcctcactcacacagccagtggagagagggtggccctggcataggggctgagtcagaggttgtggtgcgctggcagggacagcactgtacaaggccctccgcagggggcacaggcatgtgcggcttggtacacctgaccgtgaggctgacacgcaccagggaacagggcgacccagcccaaaggcagcctccccagccccgaagaggcgccttcactgtgcctgcccagggcggtgggcagcctgcactcccaggccaccgtgttccctccacatttggggaagaactactgagcctgaacacagctctgtagtaagctggtcaacggttcccctgtgattccaccctcaccagatgcaggggtgaccatccaccagctcctgccagaattctaaaggccgggccagaagacctccctggctacgagaaaactgcgcggctgggccagcagggggagcaaaggccccacgatgaagcccgctgcctgcacacacagctgcacaactcctggcctcgggtggggacggcacctgcaggcctattaccaatgaccgaagagtgattccacctgaaaaagttactgtcaatccttttgattaaaaaaaaaaaaaagagtgccggtcactgctgacacgcccagaccccagcacttccctcttcctgcttctaaaatgaacatattccaaatttcaaaactaatacacagtcacagaaaacccagaaaatacagaagagatggcatctccacattctgacctccccaccacagccagcattggtgacagtaatgttttttcttccatttaacaaagaaaatctgccaacagtttcaaaataaacacaactgccagacagaggaaattttaaagcttgctctactgggattgtgagtcaatccatttacaaattaccgtggggaaaactgatgttttttaaatacttataatttctaatcccgaacaggggatgccttttttatagctttcaatacctggtgtcatattcttactggccacagtaagttcttgtagatcattcctgagtagttcaaggcccatgatgtgattctgaacaagacgttttcctccacacacacagaaaacctactggctgggcccctgcctccacctgctggtgacaggctctcacgactactaacagcctcccacttggtccctgacactgactaattccctggtcagggctagaatttctggaaaaaaatgtaaagtaataatatgcaacagtgtttcttgcaacactgtaataataaatgactataacaaaacaaccagaaactttataaaataaagggtctggttatatgaatcgtacgaagggcttgaaagataaaaccaggcaatatttacatgttccgatataaaaagatctccaagacgtattttcaagtaaaaaaaaaatagcaaagtatcaaaaaaacaaatgagcacaagcatgcgctggtatgtactagcaactgttgcgtgatagcacgatgacaatactggaatttggtattctgtaaaataaatctggcaactgatgtattaatgccagcattttatttcagctattcagaattcattttaaaaaacgatgcaactaaataattaatacatttcaaacactaaaatgtctacaacattataaaatgtggctttaccccacaccccttgcctcccagggcatctggtggcatttggggacctgcaggggacccaggtgtggctcctctctgcctgcctaagaggcccggccctgaataagcccccacccctgcccctcctgtctctacgcgctactcaggacccctccagccaggctcaccacactgtcttaaacattttacttcttgggggcattggggaggaaaggggaggagcaggtggtgaaaggggctgggagcttaaggcagacgcggataaagagcaagccagcctgtcccgctaaggcaggcagacactgctaccgacattctgttcagagaaaccacctgtcccgctaaggcaggcagacattgctactgacattccgttcagagaaaccaccgcagtggctctgcgaggaccggctggggtttgaggggagagtaactatgccaccttccagacctgtttgtattgtttaaaaaatatgtcttggcgaggtgcatgcgctgcttttttaataaccacccatgtgccgtccttgcgcaaagttaccctggaggaggggcaagagcctgtgctggcctctgaggtgaggaacagagggccaggaagtggggaaaggaaagaccccctttctggccttttctgcaggcagttcttttaggctttgacacgcagcgttattctacgggtgctcataggggtcacccggcgagtgcagttcatgcagctcctgtgtttccaacacactgtcaccgggacagcatgagcagggtcgcttgaaacagcccaagacaaacctgctgctccaaaacttttaggaagttgttttaaaaaaaaaataaaaacaggaatgggttaaaattatgatgtgtactggaattatctttgtattttgcttactaagttgagacatcttattactaggtttgttattaatgaatgttctgtcgttacaatgaagattcctcggccgtggtgagtttctctctcaccacgcagccgattctagtctgcgtagtgaatacgctgagggttttgcatctactgtcagaccccgtggtggctttgggaatcattctatactttaaacaattagatcctgcattattttcctacttttaaaacgatttgtttgtgcctttaaatttatcacatctttctgctttctggactacttgatttttcttgcagattcctgatttaaatgctgcctcgagtccttctttccttaagtaagcgactgaagcctatgggcttccagggccacactctggcaatgcctctcgcactatggtagataccttggtcacatccccttccagagccctgcagctgggcggcctggctgagcctggcccgtggcccccagcacccacacccacctttcccacactcccagttctcgctcacatcccctcccagcgccctgcagcagctgagcggcctggctgagcctggcccgtggccctggcgcctgtacccacctttcccacactcggcccgtggccccggcccccgcccccgccacacccaccttccccacactcccagttctcgctcatgtccccttccagcaccctgcagcagggtggcctggctgagcctggcccatgtccccagcacccgtacccacctttcccacactcggcacacaggtactcgcggacattgtcgtgcacacgcatgtgctccttcagcatgtccttcctggcaaaggacttcccacactgctcgcaggcgtggctcttcacacctgagaacacaggcatctgccactcagagccgagcagctccgacctgcagtggctgcaaagaggatgcaccaaggagaggggcccagcctccccagcagctagaagcgcagtaacaggggtggggtcgcctcttcagcggcctccacagagccctcccggggatcctgtgactccagtagatccctgaggacctggaggggtgagggggctgggggcgctgggctgtgagtggcagggctgataaggacgggaaaagctggagaaacagaggaaggcatgggggaggcaaggtgcgacggctctgtgtgtagaatacgcggagacccccagcatccctccctgccagccccctccagcgagggccgggaccccaaatgctgacagacacgcacctgtgtggatgagcttgtggcgctccaggttcccgatgctgttgaagatccgcccgcagatctcgcaggggtggatgtacctgaaaccagagacaagctcaggatggccgcacagcctcggggctccacggcagcgagggcactttccccagcaccttcatctgcaaaggtgaggcaacaaggtgccacggggatgataaaagaagcagatatttgagcctctgccacgggctcaatcgtaaccccccgaattcctacatcgaagtcttaaccccggcacttcacaatgtgactatgtttggagatggggtctttgcagaggtgattacatggaaaagaggccatcagggtggtccctgaccaatctgaccagtgtccttataagaagatgagattgggcacagacacgcacagtggaacggccctatgaggacacagggagaagacggcatttaagggccaaggagagaagtgtcagaggaggcggccctgccgccaccgtgacccctgagctcccgcctccaggactgaagatggtaagtgtctgttgtttaggctgtgccggctgtggttctttgttagcgcccctgcacgggactgtttagtcactcactcagcagaccgcgcagattatggcctgtatgtcagatgtggcctggcattaatgaaatctaattgttgcaggaaaaagcattttgggtcattctgtaggcagggcaggaaccccgctattttcctgtaacatggccagctggtgccaggagactatgcggaagcacaggataaaccccagccctgctgcccctagcccagctgcccccgagccctgctgcgcccccagctctggccctgagacccagaggacatcacttgttggaagctacaaatggctccttatagcatgtgtctctttgcaaggaagcatgtcccctctctcctgacacaacccgggagcccccgaccaggcctcacttctgcacgttggggtccggcaggttttcacggtggatgaccatgtgggcgtggtaggtggccttcagtgcaaagcgccggttgcagatgctgcagccatagcccttctccttgtgcacctccatgatgtgcttcaggtactccttcccccggccgaaggtgagctgcgggccaggtggacagggcactgctgacacccgcatgaggtccctggtcctcttagctaatgaggtcgtgtccacaaaccagggcacccgacacgccctgagagcccatgactcatgccagggtggaagggactctcagaggcttgatggggaacttttccgaagccataaggcctcatgcccaaaactcaagagcacgggtgtcctcggaaacaaaccaccctcctttttggagagccccttccatgcacaggggaggcctcgtgagggcttcaggcctcagcagggaggaggagggggaggagagaaggggaggggaaaaggggaggagagaggcgccccagcctgcagccagcacagccaccttctaggaggccgacccccacacttcatgtgtgttcctgaaccgtgtcacaaggcaagttcctggagggcgcctgtgagacccacacagaccgtccctgagcaccaaggtgacacaggctggccttcccaggcacaagtgatggacaggcacccagtctgcagtaggaccactggccggagcctttggggagggagggctgcttccgagatgcatgaaggtgcctgctgtgtggggcccacagccttgaaacgaccaccttcctctccagaccacccaggcaccgcggggcaaacccgccatacctggcaccgcttgcagctgtacttgtgaggctccgagtctgcgctctcgtcagaattgtcatcgttttcttccgaggagatcccgatcttgccgataaactcttccctctggtggtcatccatcaacgcgatgtcctggaaaacagccaccacttccggtttctaacagcgcagcagacgcttcactcagttatctacaccgcagggacgaccaatcatttccccagatgcagaagaaaatgcctctctgatgcccgtggcgccctaacgagctacacttgtgccctagcccatcccagcttgtccccagaggtccccacctaaacgctaaagctgcccttgctctccacgccgcccgcggcttcctctcacatgcgcccagcaagatcccaatctgtgcccagggccaggcactgctgggaagtccccctagtgagtctcccataccacctgttactttttcagttcttgatcagcgcttctcccagcctttatcacaccccaagtcctccctgctcccggggcttctgctccgttcctctctttcctcaaaggtggggagggacacagatgccagcaccgggctgagaagcagccacggtgggagagcagtacttcaagcctggcagttgggccacaggaggtgaggccaatgcagtcacagaattcattttggagagataaaatgcgaccagttgtcaactatttgaggacgctgctgtggtctgaatacttgaaccctcccaaattcccatgttgaatcctaactcaccaggaaatggtatcaggaagcagggcctctgggaggccattaggtcatgaggctggagccctcaagattgggatttggggtggggcatggtggctcacgcctgtaatcgcagcactttgggaggctgaggcaggcggatcacttgaggtcaggagttcaagaccagccgggccaacaaggtgaaaccctgtctctaccaaaaatacaaaaattagctggacattatggtggatgcttatagttccagctacttgggaggctgaggcgggagaatcacttgaacccaggaggtggaggatgcagtaagatcttgccattgtactccagcctgggcgacagaacgagactccgtctcaaaaaaaaaaaaaaaaaaagaatgggatttgggcccttatagaagagatccctacccttctaccatgtgaggacacagtgagaaggcgccgtctacgaaccaggaagtgagcctcgccagacaccgaatctatgggggctttggggtctagcctccagaaccgtgagcagcacatgtctgcccagaagctgccctgcccacagaactctgctatggctgactgtgacagacgctggcctgggggcctgccgtgagcatgcctgggtgagggcagcacgcgatcgacaccttgaagtggacatggatgtggtccctgagcacatccacgcggaagaacttgcgcccgcagatctcgcaggtgtacttcttgtcgccgtgggtgagcaggtgcttgttcatattgctccggcaggagaacacctgtggcagaggagccgcatggtgaggggctgcggcgtctcgtgacgggaaggagcctctccatcaggctcctctggggaaaccacaacccgggacggaaacacagcactgtgctccaggccttgcatctccagttcctcagtgtgtgagagacacaaataatcactgatgccggaataagggttacttgctgaattgtgtaaacaggtgcttacgttacaatagaaaattgaccatttcctagtctttattataaatgttagttcagctccatttttttaagcccatttaaatatttccctaggatggactaccaaggaaccagcaaaccacagaagtacctgcaattttctgaaaggagatatcaaaaaagaaagctagttacccccttggcttttatactgtgtttaatgcacattcccaatgtctctgatttcctgctctttccagcctggcatgatgggtgtggagatgcacccattcatccaatacgcatccaagggggtcacctctgtgaccagggctggggttggcgctgggtggtccacatgacagatgtggccccactggcacagagcagtggacaaggctggaagctgagaccactgctagggccctagaaaccccagcgctccacagaactctgcgggtctctatctggatggctattcccagcggccacgtaatccggggtgtgacctcctaaagttcgcctgatgcccacattgtcaagaagagaacagatgaatgaaaagaaatgagtgattcgctagggagaggatgccggcatctccaggcgacatctctttccaagatgtgcagatgacttgggctgacagcgctgtgccccatcccagggatgctaggtggggcaatgcgacagggtgaaaggtgagcaggagaggacagagtctgcagatgtcatggtctttacagggaagactgggctgaagacaactaataactggaaacaacaaagaattcagtcacccaaactacaggctatttcacacctgcctcaaccctcagtgtttattcaataaacactgcacagaataaaaacctgtttggatgtcaggcacagattgtttgcacaaacaatctctcaacagcatggaaggcacttggagccggtaccccccaaggggcagaggtcagtggacagaaagactggggacgggggataaggggcacaggcttcgcccacctctgccctgtgcatagctggcccagctcgcaaagtcactccaactcacctgctctaccccagccctgcccctccagcccacagtccggagcctcacctggacccccagccacacctccctgctcactcatttgctcaggcttgctctgtggtttgaaaaaaatcaggaaatttcatataaacactgagatttccattttctctttaaaaggtcaaaagctcggtgatggtgctgcatgctggaaggcaggacggcggggacggtgacagcgggcctcctgcgggggcctgtgctcccagctgctgaaacgctggatgagcgtcactccggggctcacgtgagctgtgtgtggctggggcaccctcccctcggcggctcctaaagccacttgagcgacgtgctggagctgctgggcccagagcccgcttgggagctgctcagaacccttactctgcagcatgagctttgcatcctgtgagggacagttcctaggcctccgaggacagatgacatcttacagtcacctgagtgaaagctaagtaacgaagaagtgatgccacctccagtcacaaccaaggtgcttctgcacagaacttggggccatggcagcctgacagctgtgaggaccacggcatggaccccaggctctcccgggacgcgcagcgtgtttgctggatgtttaggatccagcatctctgccaagcagccaggtgtctgaatcctgagctagtgccaggatggccccctcaccgtgcagccctcggatggatgtgctcccatggatgacatcaccctttcctctcttgggcagcgccgggcatccactgaacgtgcctgggagcacctgccatgggatcggccatgctctaacttacagaacgccagccatccactgcacggaggagaccggcactgacaggcaaaataaagccactgggtccccctgcgtcctcattcattgtgccccagtcctgaccacaaggtcactgtctcaacgatgctatacaggagagtgggagccagggagcagctcaggaggaaaatcatggcaaagaggaaaagaggctgtccaggaagaatccttctttctcagcccactcactggaaacccatcttaagtaccaaagaaatccaaatggcaagtgtttaaaatgggtggacaccagtttaagacaacctgagcacccatcgttaccccccaaatcttccctgcaatattctataagtacagctcatagagtcttaactgaagaaaatgatgtgctttccatctcagcgtccgacgtggactgcgagcattaccttgccacacaccgggcacccggaaggctccttcttgtaacggaccaggttctccccaccggcctccaggtcctctcgcttcactcgccgcactcctgaaattgccaaccccaccagcaagacagtgaatacacatagaacacgcgaaggtccatcagattccacttcagccagcatcctttccagcgcacgggaggacagggctgcccacagtggggacagaagcgtggcagtttaagtaacatcacttgcacactgtttggcatcagcactaaccaccattcctgaagcagccccagggaaggaagggagatggcacaacgtatgtgggatctgccgagacagttctcgcatctgaaacatttggaaatataatggcatcgagtgctaaatgttcctaggtggcagagctatgatgagctcctatggaagaaggcacttctaactccatctaaaggctcaaagccaagttatgattcttatagatagtgaaataggcaggcattttttatttaaaagatactaatattcatctctcgcaaattaacattagtcaaatcaacatcaggctggtaaatacaacctttatggttttgaggcatattgttccaaattgggatcaagacagacttttaaatgttcatgcaaaacaggtaagttttgaccaaaagagagaaacccacttctcaggatctctttctacactgccgacccattctgggagcattcctgcctggccaggtgtaagtgcagagttggatttaaaaatgctcagcaaactggacgttggacaaacggaccgttctccaaaggctcccagcatgacagacacaggagtctgaggcgcagcttagactaagctccagtatgagggacaaacccataaaacagtcacaaaaacatgagtttactcccacagaagacgacccgagttacattaaactgtaaaatgcaacccagctacactgtgtccctggaaacagctgacttctggcagcatccacagttactggcatttatgggcgcttgccatgtgcggggtcctgtgtgagaagtttcaagagcagggtctggtgcaaccatcacagcaatgctagggattcaggtctgagtactgtctcccctgcataggtgagaaaactgaggcacagtagcttgctaaggctacccagtcactaagtggagtccaggtttgattcgagaggccctaagtataccacccaaggaaccacaaagaaaaacgttgtcggtctttatgaatcaacatgaagaaaagagttgagcaaaaaaggaaagtgctaaaaggtacacaggatgcaattccagccttgtttttttaaaaaagggacgaaggcacatgcgtatgcctatttggacggacatggttatacttcattttttatttttgtatatattttttgagatagggtcttgctctggaaagcagtgatgcaagcacagctcactgcagcctcgacctcccagcctcaagcaatcctcctgcctcagcctcctgagtagctggcactacaagtatgtgccaccatgcccagctaattttttgtagaagcagagcctcgctatgttgcctgggctggtcccgaactgctggcctcaagcgatcctccagctgcagcctctcaaagtgctgggattccaggcgtgagccaccatgcccaggagggttctactttacacaggactttgtggtctcacatcttcttttcaacaagcatatgcttcatttgtaattataaaataattttttccaaattttaatgaaaaggtgtatgaagggctgctgctcttagttgctcttatactggtttttcccactttctgtcatattgaaagcatttttcacaatatctagtatctttgaaaaaacacttctaatgacagtgaaacactggaccccacaaatcgtccagttttcttagctccttccccagtgtggaacatttagggtatttccagctgtttctccttgcgcacagcaggtctgacacctgtgtctcagcaacttactctcctgagacaggttctcagaagaggatgagcccatcggatggcgggcgtttccaggcaaaggagcaggcggcaccgaactgctccccaaaggccctgctgactgctccatgccgccctgccccaccccgcaggagctgcctctccccgcccgcagcaggtgcgcaggcggcctcaccttccaggtgccggcgctggtggtccagcatgacgtccttgcggtagaacatcttgctgcagacctcacaggcaaacttcttgtcgccgtgcttcttcttgtgcttggagaggttgctgttggtggagaagaatctgaaacacatctcacattggaacgtcttgtcatctgtccagagagcaaacaaacacacaacgattttgaggtaaataacatctcacgcaggcacgcacgtgtggcctgaacgtcaataaagcgcgggtgacgggcatgagagtcacggggatgcgtggccaggaagaaaacagcacctgtgtgtcatacactgtctaccccaggaactcacgatgcagagacgggaaccccggtgcttgaaaagcagacacggagctcacctttcatcaccaagcaacgccagccgcctccctcccgggccaccctgccccacagcacctggggacgatgactccacttccgtcaggaaagctgcccagtccaaagcttcccctgggcctgcaccctccacccagcatgactgactgacagatagaatgacctacctaccaaccaaccaaccaaccacccgagcaactgaccacccgaccaatgtggccgcccctgcccccaggatccctggtgttggcccctcccaactccttccccgtgggcgggcatcaatgtgcccatattccccccttcacccaaatcctcctcagcacacacacaatcacacaccacacaaatacaaacacactcaacacacaccccccacacaaatacacaatcacacacaccacatacacacaccacgcacacatgccccacacaaatacacaaccacacacaccacatacacactacacacacacgccccacccaaatgcacaatcacacacaccatacacacaccacacacacacgccccacagaaatacacaatcacacacaccacactcaacataccacacacacatgccccacacaaatacacaaatacacaatcacacacaccacatacacacaccacacacacatacacatacatgtcacacacaccatcacacactatgcaaatacatacacacccaacacacatcacacacacacacatgccccacacaaatacacaatcacataccacacaaataatatactcaacacaccacacaaaaacacatgccccacaaatacacaatcacacacaccacaaatacacacatattcaacataaactacacacacaatacacaaataacaccacacacagaagccacaaatactcaacacaccacagatgcaagccccacacaaatgcacaattacaccacatacacattcaacacatcacacacatataatcacacaccacacagatacactcaacatacaccacatacacaacccacaaacagacattcaacacacaccacatacactatcacacaccacacaaatacacctgcactcaatacacaccacaaatacattcaacacataccacacatacaccccaaatatacacacaccacamaaatgtactcataccacacacacgagccccacataaatgcactataccacatacacacacattcaacacaccacacacatataatcacaccacacagatacactcaacatacaccacacacaccccacatacacacattcaacacacaccatatacattatcacataccacatacacacacactcaacacacaccacacacaaatatacattcaacacacaccactcaccccaaatacccaatcacatactacacaaatacacagtcaacacacaccacataaacatacactcaacacatactacacaaacacacatactcaacacaccacagaaatatacaatcatacaacgtacacccacacattcaacacacacaccacatacatactcaacatacaccacaaactcaacacacaccacacacaaaaatacacattcaacacacaccccacacaaatacacacacaacacacacattcaacatacccccaacacaaatacacacattcaacacaaaccacaatcacaccacacactcaamacacaccacacacacaccccccacacaaatacacactcaacacacacatccacatacatgccccacacaacacatactcaacacatacaccacacacaacccacacacaaatacacacacaacatacaaacacatacgctcagcacaccaaatacacacaccacacataaatacacaatcacatatcacacacaccaaatacacactgaacacataccacacacatacaccacacacacactgaacacataccacacacacataatacrccacaccaaatacacaccacacacgaatacacacaaatcacacataccacaaatacactcaacacacacaccacacacctcatattcaacacacaccacatacacacaaacacaccacagaaatactcaacacacacaccacacaaatactaaacacacaccacacaaatacatccacataccacacaaatacatccacacaccacagaaacacacagccacacacagtccatgaagcttccagaaacacctatatccctgcatcccagacctcatctccagcccctcctggaaggtagccagtcaaactgtggtttcggctccgcccaggacactgacagccccccagtgccatctgtccctctgactctcacacaggcacctcgggggtcctcactgcccagtccctcaccctgcagcagcagccccaggtcccctcgccctgcccccatccatcagatgtctcaccagttgacggcgaccccggggcccagcagagctgcattctcctccctgtgtcgccaacgtgggaggacatgacagctgggtgacccaggagcggggcaccagagcagactgcacttctgggcccctgggctctcacccatggaccagctcccaggctcagtgtttgccaaatatacaaatccccaaaactgcactgaaagctgccatttgtgcaaagcagccgccctgcgcctgtccctctctgctgcccgagggagccgccacagagtgtctcagggtccccctgtctagggtttccctgcctcagcgttttgggccagatcctttgttgtgggccaccctgtgcaccgtgggatgctgagcagataccgggcttccacccagtaggtgccaggagcacccctccccaccaaggtgtctgcagacattgccgacagcgtcccttggggcaaacgccctccactctccacccccgccaggtagagattcactggccagggctcacaaaatgagactctctggggtgggccttgggcctccgcatgtgtctggcctcactcaggtgatcccaatgtgcagcccaggttgggggtgagggaagcagacaacctcccccgggagagccaggcgctctcaactcctcccagctgggaatggacaaggcatggccgacagcgaagacaggagacagcagtggggaaatctatgccccatgggtgccaccctcaggacaggggaagcgctgggaggggacagtcccctcccacagctccaaccacggcaggacagtgggaggtggcctctgccagggctgaacacagtagaggtggccctgtgcgaggcttctctgcccacatcccaccccacctgcagcgtgacctcagcccagagccagcctcacctgggccataagaggagcaccgtgacagatgctacgctgagtcccagcctaacatactgcttgccttccttctataaagtgaaacattatccatacagccactgccctcagtttcgttttggcttaagatttgatgggctctgtccggatccacacgaccgcatggtatgtgtccttcacacactgcgtctgaggcgtgcgtgtttacagtgctggacgttttcatgatcactttaatggctacgtgatattccatccagctcacttctcaaaactcactttgctatttttgacactgtagataatttagtgatggaatctttagtaatgcagatttttttcttctgtcaaatctctttatcatgaattcttaggaatgggaccactagagccaagcgctttgtgaaaggccacaccttacagcgctgtggcatcagattgccacaggccacaccttacagcactgtggcatcggatcaccacaggccacacctttacagcactgtggcatcagatcaccagaggccacaccttacagcgctgtggcatcggatcaccacaggccacaccttacagcactgtggcatcagatcaccacaggccacacctttacagtgctgtggcaacggatcaccataggccacacctttacagtgctgtggcattggattgccacactcccctcaacctgggcctcctgaacagcataggtgagcctccctcccagccaggcactaaagagcacaggtgagcctccctcccgggcaggtgctaaagagcacaggtgagcctccttcccaggcaggtaccaaccaatacaagtgagcccccctcccaggcaggtgcaaatcagcacccatgagcaccccctcctgggcaggtggctccactagtcctgccgccccgtggaaggcaatggtgctgccaagagcttcagctttctccctcacaagcccctcgtgaccatggaaagagaacctacttcaggccactccccagctgtcccggacaactctgccaagccgagggtggcttctcccgcagccacccactcactgccagttcaggaacccacaggggcactgggtcccaacaatgcttctccctccaataaccctgcgccgaggggatctaggtttatgtctgaataaatgagccactgagaacagctgcctactggggtctgacgaagggagaggggtgcagggcacctggggatggagaggggattattgggggaggctggtgggccgcattttgcctgagggcctggacgtgagcctttgctattccgtagcacagtacttatggtcagacacagcacaaggaacacgaagatgagttacaccagcacctggtcacaccacaagggacaggcaccacaacaggtcccatggagggagcttcagaaaaacccacaagactgtaacattttaaaactgccccccacacccctctccagggtgtgctatgagtcctcgagagagggtgacacaaaggcaacagtgacccatccctctgtgccccgctggggacccccactgcttgggcctccagtgccacccaccactgggaatggggaaggcgtgactcccacattcttggtttaattcttggtacaaattcttggtttaattgtctaaggaagatacacattctcttaacttcaatactataaataagtataagagcatgcaaatcatatattatgcaaacaagctccatttcaaggtttttatcctttctgttcagtctaaaacgggtaacctttgaaactagaacatctcaggggaagaggtggtgcgatgcaggtccctggcgctctgcgggttctaggtgactaacaaaggccagcacctggcctaacagcacctctggctgacaggaagctgctgctgccttagccgcttctagtactttgttttatttgggtccagagaaatagttgaaaatatcagagggcaatgcctcttcctcaaccttgagtctgcctcaccagagcgccttagctggtagcatcactcttgggaaccccgaaaccctcgcctgctacactcctgcaggactgcggggaccccaaggggaggttcgcaaacaagatgaaggttcatctgtctggccggggctgcgttaagtggaagtcttcaggggactgtgccccaggtttcttgggaattcttgtgataggagggcttaaaatgcaggaggtgcggcacactggaaattcatccagaagcttctggaggccacctcatgccagacatggatccttcagagctgctaaagcttaggcaaaacatgactcattcctgcccctcagaacagtccaaccccaggaagaaggcatcagggaggaagaaccaaaccctggtttcaaataggagccctcagagtagaactagccaaccccaccaagggccccccgcgcccagcagctacggcaagggagcagggcctctcacatggcccatgtgcgacagccctggtcagagcccctgggagtccgctgctgcaggtgccctgttctcaacacaggggcgggtggcaccttaacaagaacaacacagagatgcaagtgacagacacagagcaggcggacaaggacggggtgggcgtcgaaggctaacctggtaggtctctaagccgactgccgccgggccccccctctccagggtgtgctatgagtcctagagagagggggacacaaaggcaacagtgactcacccctctgtgccccgctggggacccccactgcttgggcctccagtgccacccaccactgggaatggggaaggtgtgactcccacatcccagagggtgcacgtcatcactgcagaatacaggggcgtcctcgggccacgtggagaagcgcagccggcaggacggccttggctttcctttggtctgtttacttgccagcagcaaattcggccagagagacaggggcctcagacgccccccaggcccgaagaggccacctctccactacaggctggtccaggcacacccggcttcaggcctcacacaaggaaaatgctttatttttggaagctggtgcacacaagcaggctcagaacaaaaagaatgcgtgcaggggcaaccccgttccaccctggacgccgcaggagatgtggatggaggagggctcgcggttaggaacaacctttgcaagcaagcgaggagcgctcacactcctccagccattatcctgatcttttcctttcttcctcagacggccctagaaaacattggacactgctgctccctgtttttagccagaacggaccccggctttacaatgctctcagtgtggggccatacgcagctcggctgacaaatgcaggaagaaaatcaatccctttttactggaaagtttccatctgtgtatctttagggtaacaactgctttgaagcaaaatggacagagggaaatgttaaaagtgaggctgtctattcatgaaaacaatctttactttggcctaaagttccacggtctccgcggcgtatctagaatccgtaccgcacagcggccgaggggagacgtgaccggcgccctcacctgtcctgcagttgtggaactccagcgcgctctcgatgcggaaggtcttctcacaagtgccgcagcggtacctgtactcgccgtccacctggtcagagggacacgccgtgagtgagatggcccagcgcagagtccacagatgccgagcccccgacgtgctgcccgggcgactccacgcctgtgtctgttatgactctgacctccaccaccctcccgctctatttaggaacacaaaggatgtttgctcttgctgttcacctgccctagaaagggaactccacactcagggagccccactccaagcaccaaacacccccattctcctgactcttcctgctgcgcttgtgggcatctgaccaggacgaggggctgacaggtggcccagggacgccaggacacccacagccttcacccgctctcatccctcctgggactctcccttctcagggacacctgggcacccacagccctcgcccactctcctccctcccccacagggtttggccgctctcctccctcccccacagcccccgcccactctcctccctcccccacagcccccgcccactctcctccctcctgggattctttcttctcattacaacatggtgatttggtcagttgtctgtgttgtccacacaactgggaagagaaccctgggcttgtttccacccacctcgttcctgctgtgcttgtaggaaacgtgctgctttaggctctctttgcggctgaacaattttgcacactcttcgcacttaaacagcttgtcacctgaggaaccaaccaacagagagctcattcactacttagagcatttaccgagagaagcatgcccaccggggaaatgccccacaagccgcctcgctcccaccatgcgaaggagctgcagagatgatcgcccacaaatgcagcctctcactggcgcagctcgtgggagacgacccaaggaggggagactccgtgctgtcctcccacccccagccccagtcctggccctggccccgggcgccagccgggcctcgcggactcaccatgcgagcgcacgtgcctgctcaggttgctgctgttctggaagatcttgctgcagatattgcactggtaaacccgcttgtgctccccgagctgtttgatgagcttgcgccggatgccgtgtctgcttgagagaattaagctcctcttgagcgtgatggtgttattctgatgatgggtgaacctgcccagggacgtcaataagttgggaaaagacaggtgggaaaaaagttccaggttacaagcagcatgaaaacggcctccttccaaaacttcccagctaatcccgagcctgtatgcgagaaaggagggaatgcgcccgggcgtcactcccagcttccagggcatctgaaagggacaccttgaatatataatgacattaggcagctttagctgcaacagccacacacctgactctgttctaactctggccaccagaaagcctggaggtcaatttgtgcctcaattagaataaccacacctgttttctgctcctgtcactctgtcttaactcttctctgttttacatattatctgaacctgattttcaaaacttcttttccctgttaaatgtatttttgatggtaagccacctgaactcttctgggcaataagataaagtataaataaataaacaggtaacatcatttctgatattacttttgccaactataagaggtgatccgaaaagggccaaaaagaagtgaccaccaacttactcaactccatggtaaaaatgacccaagaatcgtaactaaaacacagggcaagctgttatatttactgaaattcaaatagcaaagtattttaccacagcagcgtcacgaaagctagaagcaacccaactgtccatcaatggatgcatggaaacacaaaatatggggcatatgcatgatggtatattactcagtgttgaaggaaattctgacacaggctacacatggatgagccggggtagaataagccagtcacataaggacaaatcctgtctgattccacttataagacatctctagagtcatcaaatccacagagacagaaagtagaatggtgggtgccaggggctgggggagggggctggagcgggtgcttagtgcggacagcgtttcagcttgggaagacgggaaagttccacagatggatgggggagatgattgcccaacagtgtgaacatcctgaatgccactaaattgtgcacttaaacatggttaaaatggttaaatttatgcatatttaaccaaaataaagcatttttctaaagctgttttcacagtggatgcaccattaaactcctgagctccagaacattcctgagctccagaacattcctgctgcctcctcagcaggtctgtttccatctccttccctggggctttcctgctgggaaggtgccttccctccagaatggcctggctgctgccagcattgtctgtccacaggacggccccaggtgccaggcaggacttactttggaaccgagctggtgtcagtggtggtggtggccagcttccccagaaccagctccatgatccgctcatctggcgttgcactcacaggctcatccggagggacctcggtaatgatctctgccacttgctctgtacgaaggggatgtgacaagctaagtaaccacaagagcaggggacaaacacagtcaaaccatggtgacacactgccccatgggaaccacagccaggccagaatggtaggcacaaatgttgaggtttacagaggggaaaaaaaaaactgtcaatattttgggatccacacatttactagtacaaacagaaaagcaaaatgtttttcttagcctaaactgaagttataatttgttattctttttaaaaaccacaacatcataacattacttcaatccctcttcataccaaccaaaaacattttggatatatagcagaaacttcgaacttactacatcaattctgacagagttttagaaatgttaatgtttctaattaaatgtgccaacattagtaaaaccattttagctaaccattttgtataagagttaaagatcacatcatcgccaatactggagaccctggccagaaacccaagataaatgaaataggggaagattacacaaaaaaattcaaccactggtttctaccactttgcctactaaatgtcttctcaacacaagtaagaattagtgaaatatctacctgacacgctttcccccgcccccatcttctctgcctattcacagagacctggggaaactggccagggggctttcaggcgctcctaaatcagcgcccaacagtgcacagcctagaagctgcagacccacagcagaaaaggggaggctcagaatattccacaatggctgctcttcccaattgtctctaattaatagaagcaataaggactccttttcactctcataaaagaaatcctggtgtatcccagacagtaaaaagaaaaactgcccagtgtcagtaacaaatgtgaaggggccagtggctgagcatcagatctcatcctcactgtgaggcccacgaggcgtgtgctgcaggtggcttggatgggggctgtgtgaggaccacagggacaagagccttacagagaccacacaccctggaagagggtcaaatgcctcttcaaacccaactgaggatactgcacaatcaaaggatgagccctagacaggtcctgggagcaactcagtgcccacccacaggtgatggaccaagcactgttcagcaatccaggagaaggagccacagataaaccacgtgggcgggtctcgaggctgtaagctgcctgaaggaggcagacagagtccattcgtgagaaattccaggatgggtggaatgaactcgtacagaagacagtcaggaaagtggctaacgagacagaaatgtcctctaccctgacgggggtgctggtttcacagctgtatccatttgtcaaaattcacaccctgtatcctttttagtgtgacatgtattacatggaaattgtactttactagagttgattgagagaaaaacagacgggcttagagtctaccttccacgaggcctttctacactgagttttcccgccccgccctctgccccctgccccgccagccctcgggcgccaggagggctgcgccccacgcaggcactcatccccgggacccgctcatcacctgtgggttccttgtcttccacgatgactagaggctgctcagctttggacactttgggttttctcccccttcgaggctttttcttctgttctttggtggcaacattctcgctctcgggcactgcagggggttccccccggggtgtgtcctgctccttctcgggagctgctgcctcgctttggctgcctggaggaaggcttttggcttgttctaagtggcccaacagatgttctgcaaagagagacgcgaatgcaccacacaattaggaagcctgccaccgtccacacccaccctggcctctggttcctatgtgtgtgtgttttcaatcttgtttgccaacctttgtataggcaagtgaactttatttctactgttttatttcctctgcatcaaacacaactgctattttgaaaagtaaattaagtggtaaaagcaagggtaggttcaccatgagggcagtttagtgaaaaaagcagacatacacacacacatatgtctgcaaagcaaaaacctgagaaggagatatcaaaatatgaatgtgtccaggcacagtggctcatgcctgtaatcccagcactttgggaggctgaggcaggtggatcacatgaggtcaggagttcaagaccagcctggcaaacatggtgaaaacccatctctaataaaaatacaaaaagttagccgggtgtggtggtgtgtgcctgtagtcccagccactggggaggctgaggcagaagaactgcttgaacccgggaggcggagcttgcagtgaactgagatagcaccactgcactccaaccaggtgacagagcaagactgtctcaaaaaaaaaaaaaaaaaaaagaattgcaccctagacctgtgaaagctctgggagacgtagcagaagcaaaatcaaaacactatgtaacaatccagagtgcatggaaggaccactgtaggggcaggggagaaaagaagattccttgctaaagagcttaccaaaacaacaacaacaaaagcaagaaaagtcccaagaaaactaaaaaattaagcaataagccatcagggcgtcagcagacacatacacacaaactcaagaagaatggaattcctagataataacacaagctgagaggagaaaactgggggaaaatacatttaaatgaataaagaagggttaaaaaacacatattaaaaaaaagcaagggcatgctgaattataacaagcggttatgaaaaataaccaaataaaacttatataaaataaaaaggaggcccaaaataaaaacacaatgtgtcgtattaaacaaaaaattagacacaactgaagagagaactcataaagtaaaatgaagagctgcaaagattacccagaatgtagaaaagagacaaggagctagaaaaatatgagcaggagctaagaagacatgaagtgtaatataacaagaaggtctaaaacatgtacaataggacacagagaaaatagggaaggagggctaaacaatgagcaagataagggtgggggattatccagaatgaatgaaagacatgactcttcagattcaagatctgtaacagggaaaacaaataaaaataaagacataaatgatgactctgttataaattgcagaattccaaagacagaggaggtttcaaaagcaaccaagtacaaagcagtgattacctatgaaggaacaactgcagtgacagcagacttaccaagaataataatggaaggcataaagtagcataacaacatccccaatgtgcagaaagagaataagaataaacccaaaattcaatatccggtgaaaaccgtttccagtgcagatggttaaagaaagatattttgagacaaagactgaaaagattgccccagaggaaattctgaaaggcaataagagtgattttagattgagggtcagaaatataaaacaaagggaactaaagttaaaaaaaaaagaaaagccatacataaggaaattagcaaacatcattctagacaattacaaattcaaacaggaaaaacagagcaaattagaaaatacttagaactaaaatatgggaggaagagagcccacacatcaaagagatgtatatatactctacttgttagatgcggcattgtaaatatacttattaaatcaattgtgttaactgtgtgcttcaaatctgtatccctgtgattttttagtctgatttataaattaagatgtatgtattaaaagctcccactacagaggcagatttttctatttctcctcgtagatctgccaatttttgcttattattagactatgttattaagtgcatataaactcagatgcactgtatcatcaaaatgtggaatgcagctaacatggttcttaagaaaaaatcatctgaaatgcttacatgagaaaataaaacagctggaaagtaatgagttaagcatccaacttgttagaaaggcacagaatgaaaagtataaaaagcaaataataaataagagcagaaataaagtaaatatacaataaaaaggatcaacaaagccaaaagtgggtgctttgaaaagactaatgatattgataagtctggcaagaaaaaatagagaatgcagaaataaccagtcctagctgcaaaagagaaaacagcagctctctgtaaccactcgtccccacctattatcacctttccattttttagtattagatagcatctattatttaacatggaggagaaggatttagctttcttatagactatactctccctcccaaatgcttatcttctccacaatctcaccaacatatttatatcactattttggggtaaatcaataatcagtgtattcataattatgaccataaaaatgtattcacaactgcaccaatatatgtttatgattctttttttgtttgtttgtttttgagacggagtctcgctctgttgccaggctggagtgcagtgtgcgatctcggctcactataacctccgcctcccaggttcaagcgattctcctgccccagcctcctgagtagctgggactacaagcgtgcaccaccgtgcccagctaatttttgtatttttagtagagacagggtttcaccatgttggccaggatggtcttgatctcttgacctcgtgatctgcctgcctcggcctcccaaagtgttgggattacagccatgagccactacgcctggccttttttttttttttgagacggagtctcactctgtcgcccaggatggagtgcagtggtgcaatctcggctcactacaacccttgcttcccaggttcaagacattctcctgtctcagcctcccaggtatctgggactacaggcatgcaccaccacacctggctaatttttgtatttttagtagagatgcggtttcaccataatggccaggctggtctcaaactcctgacctcaggtgatccacctgcctcagcctcccaaagtgctgccattacaggtgtgagccaccgtgtctggcctgatttttttgtttttttgtttgtttttttgtttgtttgtttgttttaagtatatctataacctttgttttctctggagttaattaatgccttactttttattaataacatttgcttatttttttcccgtgtttatattactaattgagacttaaactctgccagaagtataactctttcctctacaaacacatcagttaatgctcgatttcttttcctttttgggccattcttcctggagcccttgctgctgctccaatctggaccagttatctatccttgaactagggaacgtctcttgtcctacaatctccttcgacagcaacctgggcattccctttgctcctttccctcaaaggatcctctattgtatcctacacgcagaggacatgtgccatcttttctggccatccagcactgtgaaacatccttgtgatgtttcgccaacttctgagccccacctttcccaaaacactcctttcccaaactctcctgccctgaatgcaggtttgtgccatagctctgtgagcaatgtgaggctgcagggggcctgagaacacattttctggcatggtgaaggcattgggctttcagagacagcacaagtttggccctgaggccaccgtcagtatgggtggcaatgtccctgccatgtgggcctgtctgggacagccttgttatggaatcctgagcaacagagcaagaccctgtctgtacaattagacctgttgacattcacctgtagttccagctacttgggaggtcaaaatgagaggatcatttgagcccatgagtttgaggctgcaatgagctaagatcacaccatcgcattcctgcctgggtgacagggcaagaccttgtattgtaaaaaaaaaaaaaaaaaaaaagaaagaaagaaagtttaaattcagagcactggtggtttggtttggaagttacccaacttgaaagaagaagcaaaaatctgtcaaatttgattctaaaactacaaaacctcttcaatagcccttccaacacttcctacaccaactcacaaaaggcagcttcacatcccttgagatcagagaggaaatgagacaaatggacaccgtttgcctcattagaacagcagcactgaaagagccaagtgaagtcccttctctgaaggcttgtgcagaacccgtctgtcatgtggctctgggacagcgctcagtgccagtccgctgaggatatccaaagtggcatgtggcacctccgccctcaagagaacacacaacccctcagcccaaaaaagagaaacacagtccctcctatctcagggaggtgacacagcccctcccccctcacagggacacacacacacacacacacacacacacacacacacacacacacagagcccctcccccctcacagggacacacacacagtccctcccccctcacagggacacacacagcccctcccccctcacagggacacacacacacacacacacacacacacacagcccctcccccctcacagggacacatacagcccctccccctcacagggacacacagcccctcccccctcacagagacacacatacacagtccctcccccctcacagggacacacacagcccctcctccatcacagggacacacacacacacacacacacacacacacacagagtcccttccccctcacagggacacacacagtccctcccccctcacagggacacacacagtccctcccccctcacagggacacacacagcccctcccccctcacagggacacacagcccctccccctcacaaggacacacacagcccctccccctcacagggacacacacagcctctccccccacacagggacacacagcccctcccccctcacagggacacacacagcccctcccccctcacagggacacacagcccctcccccctcacagggacacacacagcccctcccccctcgcagggacacacagcccctccccctcacagggacacacagcccctcccccctcacagggacacacacacacagcccctcccccctcacagggacacacacacacagcccctccccccctcacagggacacacacagcccctcccccctcacagggacacacagcccctcccccctcacagggacacacagcccctcccccctcacagggacacacacagcccctcccccctcgcagggacacacagcccctccccctcacagggacacacagcccctccccctcacagggacacacagcccctccccgttcacaggccggcctttggggctgctcctcagtctccttcctgggctctgctttccacttctaggctcctgagccatggatgttcccaagaagccccccagcgagaggctgccgcagaaggcagagccgtcacctggaaggaatgctcaggacccctccggtaatctgggtggcagaggccgggctgcccgagtacctggctccagccctcaaggctgccgtgctgtgggcagggactcctgcctctgtttactcatccctgaaatggagccacggttgtacctcatggtgttgactcaaggaagtttctggaggacctggcactgaagggtcttagtcaccatcagcctaattgtaaggggagcccgagtaccacgtcttacgtagttgatgacatacaagtagaatttcactgaaaatatgaaggaatttcttttttcttcactcaaaactagttattaagaagaaacacaaatgagcagcaacgtctgtctggctttgtggaggggaccacctggcgcaagcagcaccctcccactgtgaagcacctaccatgggtctccatgaggtccggggcgtgctctgcacaaacgcggcgtttctagaaaacccagctgccctgctctgctatttatgtcttggtgacaaacacaaaatacttctcaccaagcagagggcgaaatgacacattcgtaaattcattaaagccaagatgagtaggatgtctcaggaacgtgtgaccaggtagctaaagtctgctggtgtcagcacagtggctgtcccagtcactcctcacaactgcactgcctggaaccccaccaggcctggggcctctgagcacgttccacatgtgacgaatgccacaaactgtttctacgtgattcccccatggtttatttgatgcgagtctttcttcactacagattagcctcctaagacttgtggaaaaatcagctccctaagagaaataaacagaaagttcccagagcactgcagaagctggaaatgtgttcaattctctcccggccaccttaaattggaatctcaacctgagtagataaaaatgttctgcaggctgggcacggtggctcacgcctgtaaacccagtactttgggaggccgaggcagacggaccgcttgagcccagcagtctgagccagcctgggtgaaaccctgtctctacaataaatatacagaagtttgctgggcgtggtggcacatgtctgtggtcccagctactcaggaggctgaggtgggaggatcgcttgagcctgtcaggtcaaggctgcagtgagccacgatcatgccactgcactccagcctggacaacagagccagaccttgtctcaaaaaaagaaaacagtgtctgtcagataaagaaacaatggaaggggctgtcaagtagagacaacaaaggcaagagtgcacaacacatgccacggctggctcctggcccctggcccctgccagtgctccagagtcaaggcgcccagctgaaatgcaacttcccaaccaggaggagtgaggagtgaggcctgcaggggtcgggggtgggaagcgggactgcccagaagctttaaaccctgagaaagccttggttctggcgactacattgtggggcaatggggcagacaggacaaagtctgggacatcccgacagccgcagacaggtgacagcgtaagtcagagagaaatcgacacaggagttttacaactggggctccccacacgtcctccttaccattgaggagctgcagctccaggaaggtggcagaacacactttacacgcccactggctgggctccgactccacgggggcgctgttttctggggtgcctgcagcttcaaaagacatgagaggagaaaaaggtgacccccaagcagctcatatgtctccatgaatcccggcgcagcggaggaggggtgtgtgctgagaggcggtgatgacagtgatgacggcagcagacgggcctgtggtcactccacatgacagacaccattttcagagctttacacacatggctgatacggtcgtgtgactgtccccttttcacagatgaggcaactgagcacagagacacgcctgctgcagggtcaccagtcacagagctgagaactcctccaagaagccagtccagagggaccaggctcatcccttatatgacttcatgagaaaagtgcattcctcaagaaccaagtgtaattcctcatctctcactggctcatagaataagagacagtggaaccccaaacggccagccagtggcgcccccgtgtgtggctgggctgctgctcccgcccagcgctatccggcagagctttctgtggatgactgacgtgctccacagctggtatccagcaaggcagccactaaccagatgtggctcatgttccaggaaataagtgtttaattttactaagtttgaacttaattttaaataggcacctgaggtagggggccgctatcccaggaagcacctctatccctcagtccatgccacacaggaatctggggagggagagctaagctgggggtacatggcatgcggtgtaagcctggctataaagagaactacaggcaccttttaacaaaaaagtcactgatgctcttgtgcaacctacaattgggaggcgttttaagtgagtgtaccatgatctggcccaggccagtttctctacacctcgtctggcagctctgggggctggcccagggcaggacccctgcccatcacttcgactctaatcacgatacagcctgcattgaagttcatcacccacggcaaactccaggggccactcacaaagacaaactcctgggtctttaaaaaaataatccagaagtacaactgcatatgcattcagcactagaaaaaaacatgtatcttttcatatccaaaaccagcactaaggatgcaatgaatgaaggaaaaagatataggttactgctatcaccctgtgcatgcatgttctgagttttcataagataacaagaagaaagaggcataaatgcaatatgaaattttttgtcatactaaaaataaagaaagagcagaaaacggtgtggggggcaccctgccagcagggcatttttctgggacaccccatccccaccagcttctgttcccttttacgcttgctctctgagaatccgctgcttgaagaatcccaaaagatcaaggacaaatggaaatcagagccaaattcccatttcccactcaccttcccaaacatacacgggttccaaagagagaaaaacactcgcatgtgagtttcagaaaaagaggacaagggcccaggttagctggaagccaccacttctgaataaggggaatttcttcgaatccacgtgggccattgtctccagcaataagcctccacacccccacaagtgtgggttctcctcaacttggcgctctgctgctaggtaaagaggactagaaaaacttgtcatgacgactgcccgctcatcaagagaagcactcagggttttccgaatagtaattgtaaaagataagaattcttaagaagaaaatattagttaacagtcagaaggcaattcttgactgccaatcacttaaatatccaacaaaagagaagtgtcccagcaaaatctaacatcatacagctttaaagtgatgccagagatagtaacagtaggaaaaaggcctaagatgtggtgagccagactgtgcacacaaagaaaagtaagcagtaagatgggaggtgcagctagagctccgctatgcaaaaatgcagagtttaaaacaaacaaacaaaaaaggaacagcaaagctacagcacagcaaacagcctggcattccagtgggcgcggctgactgcagggccgcacgagagaacttcctgggatgaagtcgaggtctgtaactcagctgtggtggtgcttatacaactgtagacactcaaaagtctctaaactggcgggaacactggctcatgcctgtaatcccagcgctttgggaggcccagatgggtggattacctgaggccaggagctcaagaccagcctgggcaacatagcaaaacgccgtctctactaaaaaatgcacaaattagccaggcgtggtggcatgcgcctgtaattacagctcttgagaggctgaggcatgagaattgctcgaactcgggaggtggaggttgcagtgagccaagatcacaccactgcactccagcctgggcgacagactgacttaaaaaaaaaaaaaagtctctgaactgtacacttaaaattgttgagtcttactgaatgtaaactatatgtcatcagtgctggtttttaaaatacaggggccagtgaggtggctcatgcctgtaatcccagcactttgggaggttgaggcaggtgaatcacttcaagtcaggagttcaacaccagcctggccaacatggcaaaaccccatctctactaaaaataaaaaaattagctgggcatgatggtacatgcctgtaatcccagctactggggaggctgaggcaagagaattgcttgaaccgggaggtagaggttgcagtgagctgagattgggccaccacattccagcctgggtgacacagcaagactctgtctcaaaaaaataaaatgaaattaaaataaaaaatactagaaaatgcgaatcaaatggcaacagcagttgagttagaacagtgatgctatatgtgactgaacagtttccccaatgttataaaatgtgtttgtattttactcttttcaccagaaaggtgattttgaaaattttctcgttggaacccatgtgtgtttgagaaggtgagtgagaaatgggactctggctctgatttccattcgtccacgatcttgtgggattcttcaagcagcggattctcagagcgagactaaaagggaacagaagctggtggggacgggatgtcccataacaacgccctgctggcatggtgcccccccacactttcctcctggtgcccccccaacactctcctcctgggcctcatgctctctcccatgaagatccaggatgtttcttcggctgccccctccatctgtcagcaggttcaggttcttgtaaagaaacaaaatcaatcttaatgtgagctcaagaacaagttaaggccaggcacagtgcttcacgcctggaatcccagcacttcggaaggtgggaggattgcccgaatccatgagttcaagaccagcctaggcaacacagtgagacccatctctactaaaaataaaaattaaaaaaattagctgggtgtggtggcacatccctgtggtcccagctactagggaggctgaggtgggaggatcacttgagcccacgagggcggctgcagtgagccacgatcatgccactgcactccagcctgggcaacagtgccagaccctatctcaaaaaactacaaaaaaagaaaaagatggaactagaaaagtaaaatccactaccagaaaaaaataataagttacttttaaagggatgtgttactgctccttcagtacaaaaccaaagttttctctgtatttagaagacggcgccactgatctgcaaaactgactgatttctacacgaagatgcatgtttggagcaaatcaaagagacagaattaagtcactgagtcttaggatctctcacgctcaccaggaaagactcggccaccacaataagtaatttacaggaagacggttcctgggttcgtcggctgccaatacggttctaggagcacaccaatggccccggaggccactcacatcactctgcctactcccactgggccagaggtacaacaatgcacaaaaggcctccttttctcccaccatgcagcagcgttctctctgggagtgtccaccccagagggcacgtcactgagcaggagtgggattacgcagttaccctagaactccagtccttcacgtatccagtctgaacagtgagaactgggcaagcggccagctttctggatgtttctagcctctcttcgaaggtcttgttatctatcgagatactcatttctgagacgcaggcagcgttgggctccagtgcatagcttcagctgggtgaggtgctcgacacacactcagactctggtgggccctgggtgcattgggcgggcagggctctagaagcgccactgtgcctcgagagggacccctggcagggtcagggaggaggggctcaggggaaggagccagataggtggcagagggtgagaggcagtgtgtgtgtggcgggggcgctgacgcggctgcagagggtgacaggcagcgtgtgtgtgaggagcaggtgttgacgcggctgctggcttgccatttgaacaatcagcaggtggaccccagggaaagttccccagggcagccggcagcacttcaagggccaagccagagctcaacagggggctctctcgggaaggaaagggaaggaaggacccaaccagccagtgagtggaatcgccatgttcactacctctccagaaataactgcttgccatttgtccccaaacacaagtgaccatcctaaaaagcatttctgaaatctaagagtaactaagttgtttatttatttccccaattaaaaaccttgtttaggtttaagctatgctcaggtgaccatacgttcccatttacacagactgtcctggtagaattattacaagtgtccttttattctgagaggttttagggaggaatgggaattaccctaggatctccgaaatcagaggcgactctgttcgacaccacagtcccaggctgacttcatttaaatctattgtttcaaactcagctccagattgaagggtctccagcaggtaaaatgaatacgaaacacctgtagctccaataaggcgtggcaacctttgctttgaccttagccttgagggtggtgagggcatcccccaggatacaagctgacaagggggtaaacggccaaggccggcatctcagaacccaaaccccggcgtggctgcagtctgggctggccgtgggcacacgtgctgccagctgcctaggccttcaggaattccagacacaaggagcccaggtcccgaagatcacagttacttgggctctgctcagagagcccagcctcgcaggacttggaaacggcccctgacccagcaggcaccaccacaggggcctcccttgtgctgggccaggccaggcacctggttttggcaaagccacgagggtggggctaggagcagctgggtgaagagcagtgggtttctccaagttctttttgtccttttcattcttaaacatctccccacaaagccacagtctttctctgcgaagggtgcgaagcccccagtacactcagctcactttaccaacctggccgaagaggacgccgccaccgctgcaggccccagagggagccgcctggctcctcaccaaccctccccagcagcatccccagcggcccctctccacccagccctcacatggcccatagtgggttcaatagtggctccccaaaattcacatccacctaccacctttgggagaggatgtgtgcagatgtcatcaagttaaggtgaggtcatgctggattggggaggcctgaatccaatgacgggtggtcttatgaagagatgacacagagacatgggagagaagacaggcagagactggagtaacacagccataagccaagggacacaaaaggctactgtgccagccaccaccagaggttggggagagtcccgggacagattctccctcagggtgcccagaagggaccagccctgctgacaccctgaccgtgggcgtgtggcctccagcactgcgggaggcacatttctgacgtgaaggcactgggttgctggtgttttatgggggcagcgcagcgccgggacactcccacacagcccattgtggacctgggattagggacaaccaggggcattttacaaagcctcaatcatactgacaaacaggacagaccagaaccttccaataagttaagaatcttaagctaccgagctactaatattttggattacactgcatttataaaacaaggaaacaatgctcgtatgagaatcaggtcatttgggaggggggtcaggagagtcaatatctatttcgcccccttgagcaaagaatcttcatggcaacattaaataacatttgctcccctgggtagtgtcagcttcggcaatatgaaattgctgttttgcaggtcaaaagacatcaaataccaggaatttcatagagtttcttcaggttttatgaggaggatctatgtcaaaaagacccataacatggatgagaaagatttaaaattcagcagccccgcttgatgggcaaagtgatgccctgaccccggcttagcaggacaggcactgtgacccgctttttcagcaggaatgctagatttgggcagatcacgcacataaccttcactagggctttctttgaacacgcatgcacacacacacaggtatgcacacgcgcgcacacacacactgcccccaaatctgggaggaggccattgcacggtgagcagcaacactggagccgggtgccatggaccaatcctgatttcttcatctactccactgtgacctggggtcagttccttaacctctctgtgctgtttcctccgtccaaagacagggctagtaccccagcctcataggattaggaggatgggtcactcactgcacgtagcccccagggcagagctaagcagtcatgcgccatgtgacaaggtttcagtcaaagacagtggtcccatgagattctaatacagtatttttcctctattactttgtctatgtttacatagacaaatactgaccatgtgttacagttgcccacagcatgcagtacagtcacatgctggacaggctggtagctagaacaggctacaccatacagcctgggtgtgtagcaggccaggccatcaaggtgcgcgagagtgcgctctaccatgcactcatgacaatgccatcgccccaggacacatttctgagaatgtatctctgttgttaaacactgcctcactgtgttaacttgtgttacatccacgtgcccaaactgaccaaggatgtttaaaacaagcagaaagacagacccgactctccactcctccactctccgcatcccagcagctggcccagcccaacccatctcatcagtgtggggtcagcacagagccaagggaccataaccccttcggcgaggcacaagggaaggtgggctccggatcgggggccgccacataccgtggacgccagagccggcctgcttcagcatgggcttgtccatcttcttggcatagaaggccgcataccacacgcgcagctcggtacccggggggatgtctctggaggtggtgaagtacacgtcgctgccgtgctggtaggccgtcaggttctggtgctcggcctccgccgctggccgcaccagcatcatccagttgcagtcatcctcgttggaggtgtcgaagcacacggggtgcccgtccttctggaacacctgaaggtgagtcggcccatggagaagccggggaaatggctgattacccatctgtgtatcagcgtgtggggggcaggtgctgaggaacccatctagacagtgccacgtcagaggccataagggctcctgtacgggatgttgaggtgtttacaatagtgaggagggtcacaggtagaccatgtggtttggacgggtcaggttagtcacaggcaaaaggaagcagcagacacagccagcggtctatgtgtcattgggatacctgagtgttactcacggcccaggtgcggaactcaagttctaatcaggttctagtgggcatggggacaccaaagttctagtcctggtccaggtgggctttgagctacctgagcttcactcccagtccacgtgtcacggggacacctaaggctctccagatggcccactgggaactgggacacagttctactcccagctccgccacagggtgctgggctcctcaggctttatgagctgcctccccatctatcaaacagcactattgctttatggattaaatgcaggcaggcagcagggagaaaaacttacatattttgaagttcaaatcaaccacatgactataggagggttttgttccttattttctgatgtcatggtctcttcctccctgcaggaagagagctctcccctctcctaagcttctcctagagaggcctctccaaagacggagcccttggaagtgagaggcaggggtgggggaccaccaggcacctaatgaccaccagctgctgaggaaggtgtgctcccagctggcggcacgctctctctggtgggcacagaggagctgaacgctggtgcatgcactgagaacaacccagtaccaggcgatgaccttcagaatcgcgtagctgaaggaccaccaaaatgggcacaaaagacttctttaaaggggcctcgcccccaaccgtgcacccacaccaactgtgtacgtcgaccggatgggtgctgcaaaggacaggcaggtagccaacggcctttctgaggctgttttaagcattgttacatatttcttcaacttaaaacagccttttctttccttccttccttcctttccttccctccctccctccctcccttccttcctttccttccctccctccctccctcccttccttcctttccttccctccctccctcccctcccttccttcctttccttccctccctccctcccctcccttccttcctttccttccttccctccctcccctccctcccttccttccctccctcccctccctcccttcctttccttccttccctccctcccctccctcccttcctttccttccttccctccctcccctccctcccttccttccctccctcccctccctcccttcctttccttccttccctccctcccctcccttccttcccttccttccttccctccctcccctcccttccttccttccctccttcccctccctcccttccttccttctttcttttgtaaacaaatcaagtgcctttccttcttcccccctttttgctgaaatctgccttacaagctcagctttccaaaggacttccaaaaacccaagcttgttgacttcatctgcctgtcctaagacaagcagatccatttcaagggtctctaagaaaagtttgctgactaacaacccattcctcatttgtttatttcacagatatttctgaagactggctggcttggggtacgatacagagggcaggcatggcaacagtcaaaaaccagcctcgcctggcctcatagccttccagagggctcattttttacttattctaaagcctgccttgcaatttacatacatcttagttttctcgagttcacgtcaaagtagagaaccactgtcttctctcagtctgatgtgctttttagaacggccaaacttcacactattgcccaatgtctcatcactgcctaaacaaacaccttccctttgaaagaggtttgcaaactaccatacgctctgcacaggtgtggaaataactagagcgatgggcccctgcaagacgctgcctcgtaaagcctgcgacagcaatggaggtcgtaagacagctggagtcagcatttgggtttctcctgcatatgtcttaaacacactctttagtgttctgcaaaattgaaaattacaaaatactaacttaatatcgatgctcttgcaatgtaaaaagaaacattttcttggaaattaagcagacctacaatatttggagctgtttttgaggcatttataaatcatggaaactcagtggtccttgctccccattcccacatgggaacgccagaaaaacacccagttcctgagctcctgtttggcaacagcctttaccttcaggggaaatgcagactccttttcccatttggcgaccctcctggactcaaagggaccgaactgtgtccgcttgacgagctgagtgatggcgaacaccccctcggctccatcttccagtcgtctgatctccaagttgggaggaagggatgacctggaaatggaataaaacaagactcaaaagagagcactcacacccagggaccgactcgttaagataacctaaaagctcgccctcactgaccgccagggttcttcggaaataaaattctccaggtgataaaatagaagccttccaggccaggcttggtggctcacgcctgtaatcccagcatgcactttggaaggccaaggtgtgaagactgtataagcccaggagtttgagaccagcctgggcaatatggtgaaaccctgtctctacaaaaaatacaaaatattagctggacatggtggcatgtgcctgtagtcccagctactcgggaggctaaagcagtaggatggctgaacccgggagtttgaggctgcagtgagccaagactgtgccactgcactgtagcctggatgacagcacaggaccctgtctcaaagaaaagaaaaaaaacaacagaagccttcctaataggtgctcaatgatgactgagactgaggttgtgatgatgccctcgggctgtggcaaactacccataatcttgtggccttagctacacaaggccgaccacagggccctggtgagattcacccagagcacaccatggcggggctgtgcactgaaggatgggtttaattccccgtgggaaagacagtgccaacaggtgcatccctggtggggctgctacgggacagaacagggtcagactggtatggggtccagcgatggaggagggaccacagggaactcgctgctgaggagccatatgaagagcaccccgagaaagacgcaagggccatggaagtcccaaacagaaagggtttccagccaagtggagcgggccagtttcactgaggatgtgacctctttaactgaagtagaagaatgtcaaggactggggtctggggaggaaggcataggagccgggacgagcccaggacacgtccaggacagaggcggacatggggtccccagagcacaggcccctcggacagaggcggacattgggtccccagagcacaggcccctccgacagaggcggacattgggtgcccagagcacaggcccctccgacagaggcggacattgggtgcccagagcacaggcctctccgacagaggcggacatggggtgcccagagcacaggcccctccgacagaggcggacattgggtgcccagagcacaggcccctccgacagaggcggacattgggtgcccagagcacaggcctctccgacagaggcggacatggggtgcccagagcacaggcctctccgacagaggcggacatgaggtgcccagagcacaggcccctcagggcgggcaggaggccgctgagacaaggagccagcacggagggtctgactgcaggaccaagggtttcagctgaattttcatgggcaacaggcagtccctgagggttctggggaagaggggggttgatgggaagaggggggttgatctactgtctactttaggccaaaacattaatctctttgagtcacactaagaaaaaaaaataaatgaacggtgttgtggggcagtggggaggctcctggaaacagttctggaaagacggcggccacctgtgcagcggcagcacgtgccaggtaccatcacccacaacaccacaaccaccccacgggaactgccatcctctacagaggccaccgaggtccggagaggagtgccttgtccaagctcacctgccctgggccaccaggtggcacagcctcccccaggtgagggtggaacggcagggcagctgctgcccactgagccgcctcaccaggcctgcagggactgcttctggaagctgctgtgggtcagccctgtccctgtcctcataaccccgcatcccctgccccgcctgggtgtgcacgtgtccgctggcaggccaagacctggaatgcagagagaagccaacgagcagacctccagcttggctgctggtgctcagcacgtcaaccaccttggcaagtccactcttctgcagcctccacacactgtgtcgggaacagctgggctccagctaagaaccctggagtggatcaaagaaactcactctggagctttgaagcacgtgttttggtgtgtcccggcagcaacgctgctcagttcacagtgggagcggaatcgctggctctcactcagagtgcctctgttctccctcaggctccttcctccccgtctgcagacccaaaggccactaggctcctgccgcagctggcatatggaaggcccgggagctcacggcggtcactcaccttgccctgcttaacacaaaggagtctttgaccatgaccactgggcccagctcgggacattcggagtcgtggtactggctgcagtcttcacaccctgcaagcagacatccgggcattagagcacccagggagggagacacctaaagaacacaaacctgggaaatggggaccctggccccatgagggtgacccagagtcatgagacacatgcatgccgacactgcaaagacaagcaagggagggtgcattggatggcagaaggcctgtgtcccgaaggcctctgtcagcactcgtgcacacatgaggagtgcaaaggcaggacacgcccccagggaaagctctagctccgccgcacgcctcaaatcaagcacggtcacctccatggtgacgaagaccaagaccctccccaaagaatgagcataaatgaaaatggccaatgttagcaggttcatccctcctgcctagccctggattacttttctgaatcaagtgctaccccctgcaaagtgccctcggccaggagttctgagaaaggtgatcctattaaaaccatacccctgtagtgtactgcttattaaataaatgtttcatagggaaattttaaatatatagcttttctatattataaaaaccaaatgtagacgtggctttgcccagacagcaagcgccacgcccatctgtgttctatgacatagggctggtctcggacctgggacaggtccctgggtcacttacagatgaacatgatctcttcgctcccatcttcagccatctctgacacctgtcaggatacaagagagcctcattaatgacaagctcttaccaaaatacttttgttttgtttttgaaattgagctccctctgttgcccaggatagatagagtacagtggcaggatcttggctcactgcaacctctgcctcccaggttcaagtgattctcctgcctcagcctcctgagtagctgggactacaggtgtgagccaccacacccagctaatttttgtatttttagcagagacggggtttcaccatgttggccaggctggtctcgatctcttgaccttgtgatccgcctgcctcggcctctgaaagtgctgggattacaggtgtgagccaccgtgcctggcctcttaccaaaataatgtttaaagacaattcctactaaaggcctcctccagccagtacaggaacattacgtggtgttctaaagagagcacacagtggggtctcctcttattgtgggatggggctgggatccctgaaacatcttctcacctcaaataatgttatttttaatgaaagcaatggatttgaatggcctcatgaactcagactttcatcttttcatattagccatcaatttccatttttaaaacaaatatatcacctttttttggtgacagggtcttgctctgtcgcccaggctggagtgcagtggtgtgatcaaggctcactgcagcctctacctgctgggctcaagcaatcctcctacctcagcctcccaaagtgctgggattatggcacaagccatcgtgcccacctatatcaccatttttaaaaagccggttgtcactttttttcccctcactcctaacctatgcctggtgccccataaacacttgcttctctggggactaaatcaatgcgtgacgttgtggaggactctcgtgctcccacataagctgttatcagatccaataattctattccctatccatccttgaggttcacctccagaaacacttgcatagtgggtagatgagcataaactgacaccccccacacacatatattcacagggtggatctagacattgttcattctggggcctcacattcctgggctgtaaaatggaaataaaaacacccacctcatgcagtttgggaggagcataaagtgagatacacacagtatgtgccaccaaatgattattcctcctctgcccccccccaatccccaactgtgcgcaccggcatgtccttcctgcaacctgcttctctgatgcccgttgctgagtggtttaggaaagtgtgcatgctggcacttcttgaatgctgattccacacgccctccaccccgctcatccccagcagcttgaagggtgaaaagcagaccgtgcaaaactcatatggaaactcacagtcactgaacttgtgtgtctgagagcagtgccgggttgaaaacttcaagttaggagagtgagttagctacaaggaagtgaggcagaggaaagagagttccaatttgcccttaaaatgccagaaataacaaggggaggggggtgaaattttctcccaaaacagcactgtatcttcttttcctgggaacacacattcacgttcaaaggtatctcgtgcggctctagcaagtgtgactcagtttcatagccgcattcggccttgcctgccccagttcctgtggatgggcacctcggcgcaaatagggaccagtctgggatgggggctcagctgggcagtgagcaggagatgaacaggacaaagggcagaagaaacccagagtggggtggggagggcgcacgctttcatgagttgctgctgtgctactggaggtgtaggacctgcgtgccccctgcaggaacccacgtgactcacggtcaggagcttgggcgatgggaacgataggccttaagaggcgccccacactgcggtcagatcaccgcagaacacagagtcccaacaaaggtattggaatcggagtgggaggatggaaggaagtcgtcctggccttgcttacttgggagcctgcacgaatcccctgaggccttgtgtggccgcctctccccggggcagaccttgcctctggcctacacctctcacagactgcccaccccttctaggtgcccccaaaaaaggtcccctctgagcggagctgctgggagaggaaacccagaagagaggggcgagggaagctggagagcagggttttagccccctgtgctgcactctgattctatgtaaatgtccgagtcctggcaataagggtcccgattagcagcatctggtccccaaaatgaggcctctctaaaacggctcctctgggcccaagatcagaggccacagccaccctgggctgcagatcaggcctgataaacggagcatcttcaaagtctttgctgtcttggcaaaactccctttaacactcagaaagtgccttcatagaaggggaagtgtggtctccagacctctaaggcacacaagacatcccagaacaaggcacacaggaagtactgtttcagggaaaaggagaggaaaaaagaactagaagttcgagatcctgggcaggcgtgtggctcacgtctgtaatcccagcactttcagagatgaggacgggcgatcacttcaggtcaggagttcgagaccagcctggccgacatggtgaaaccccatctctactaaaaatacaaaaactagccaggcgcggtggcacgtgcctgtaatcccagctactcgggaggctgaggcaggagaatcgcttgaaccagggaggtggaggttgcagtgagctgagatcacgcccctgcactccagcctgggcgaccgagtgagactccacctcaaaaagaaaaaaaaaaaaaaagtgtgaggtccccctatctcaaccaccaatcctgggaagacttaccttacattagtgatttcaaaatgtggtccctggaccaggaaccagcagtgccagcactgcttgggaacatttcagaaatgcacatccttgcctcccacccccagacctgatgaatcaggcttggcagagggccctgcactctgtttgcaaaaccctccacgtggttcggatgcagctcaagtctgagaaccactgctctgcctgaaaaatctctttacaatttatatgactactactacaaaaactaactaaacacacctgccatcacagtaagaccacagtaataatatcaggaaaccaaacttatcagaaatgtcaattaagctcagaccaggaccatctgcatctaacctggtggtaaacgggaaatggggggtgacttcaggcaaatggggggtgacttcaggttccttacacggaacgctccgtgaagacacctgttaaaaacaactttgaaaaagaaggctgaagtgacagactcagtctacctgacttcaaacttaattatcaagctaccatcataaaaactttgataccggtgagaaggtggacagaaatcaatggaacaaaacagacaacccagaaatagacctaaacaaacatgcccaaagcattttttttttttttgagatggagtcttgctctgtcgcccaggctggagtgcagtggcgcgatctcagctcacggcaacctccgcctcccaagttcaagcgattctcctgcctcagcctcccgagtagctgggattacaggcacgtgccaccacacccagctaatttttgtatttttagcagagacggggtttcaccatgttggccaggagggcctcgatctcttgacctcgtgatctgcccacctcggcctcccaaagtgctgggattacaggtgtcagccaccgcgcctggcctgcatttttttacaaagacaaaagcggattggattttaaaatccaagcgaggaagggcaaccatttcagcagttagtgcaggaacaactgggcatccacagttcattcaaagaaatgaactataacttcatatcttactagaaaattaactcaaaatggatcacagtcttaaaacataaaatattaaataataatagaacttagaaaaacagagaaaatctttgggctctagggcaagccacagtttttaggcttgtcaccaaaaacacaatctataaaaggaaaatcatttgcatcttcattcagaaggcaacaggcaacccaaaaaccaacatgtcaaaaagtaaaaacatctggatgctcctgacaaagtctctctgcccccacctcctacatcttaggacgcagttgtcagagagacctggaaccgctgtgacctctctcgcctccctctgacacccgcccatcacccactacctgcagccccccttactacctcccttggccacatcccactttctcccacctgtaaggctgcaaagggtctccagataactcttcctcctctgcctgggccgccaacccattttccacactgcagagcagttcttctagaacataaatccaatcacatcgcttgccagcctgaagcttcactggcttcccactgtcccaggaacaaaacccaaactcctgcacatgaccaggcactgcctttctcagcagccttctcacctcacctccccacccccaccctctccagccacgcttcccggaacgccaagctgggtcctgcctctgggcctttccacatgctcgccccccaaggctggccctctccccagccctctctgcaatgcccgctcactcctcagtccccactccccactcccctgctcagtcctcactccccagccctctctgcaagttcccactcccctgctcactcctcactccccagccctctctgccatgcctgctcactcctcagtccccactccccactccccggctcactcctcactcccctgctcactcctcactccccagccctctctgccatgcctgctcactcctcagtcttagcttaacgtcacttcttcagggagggtctccctgatccacctgtccacagcgtggcatgctttctaaaagcgctctgcgatttccttcacagcaccgtcacccgtgtagccatgcctgtgtgtgactgatctcatgtctctcccaccacacttcaacggccaagagggcaaggcttgtggcagccttgcacagtgggatatacttggaccctcctcggcaccagcacacgggacaggtcaacgtctgataagagaatcagccacttcctggtacaccccctaacacaccccaggctgtggacgcgaggtccaccccaggcacagccacttcccctcagtccaccatgggggttccaccgtctttcaagacagagccctaacctcaccctccctgacaccttgctcccttcaattactctcacatcctctgtgatccccccaaaaagctgactcttcctaaaccactatctcagtttcacataatgtcatgcacatggtctgttttttctactagatttattttctttcattttattttgacacagtcttgctctgtcacccaagctggagtataatggtcccatcacagctcactatagcctcaaactcgtgacctcctgcgatcctccagcttcagcctctcaagtagctgggactacaggcacgcaccaccatgcccagctaattttttaattttttgtagagatttggtctcactatgttggccagactggtctcaaactcctggcctcaagcaatcctcctgcttcagcctcccattttggattacaggtatgagaccccacgcccagcctctactagatctttaaccatgaaagacagaagcttaaaagtgacttttccactcactccttttgttcaattcttatgtattttgtatgtagcaccctatgtataagagagccctgataaatcttttgacctgacaccttcttcacctccagataattaagagtggttggaaagttccaaatgtttcatttgcacaagttacgccaagaaagttcagaagtttagtcagattagcactaagatctggaggagaaattttacatgttccatataaaaagggattttaaacttttatattattgttttcgatatttacaaagcacctagcaaggttccaatgctaccacaatgacctgcgcttggcctctgccatcccccgtccatgacaggaggtggccccggcctggggtctctctccttagtggcctccagggaccaccctggtctggctttggccaggccgctgccttccctccacttgacactaagcctgtgtatggggttcctggttcacgtacttgaaagaaagttcaaacaaagcctgtgctactgaagaaatcttgcaagccaacaatgctgttcttggaatctgcagcctggcacccacaagaccatcttatcagctcaaacaaaacgaagtccatttcttgtccagatattcgtgggacacctaacatggccagctggtgttgaaggggctgttcatttggggcagcagaacgagcacaacgcttccccccttccacacacactacacaacagagggtgcgaccggggcctgcacaggggaagccagagagggctggtagagcccagatccggctggaccacctgacccgcatcttgattcctggggagacgccacaacacctccactccctggggagaccctactcactcccttctcagtacaaacagggaaaggtctagaacaaggaatccgaactttctgttgttaccagatgggtggatgggttcaaccacaacctgctcgcctagcagggtgacctccccagacagggctaagggagcagggactcctttctgtgctgagctctgagatgtggggagatgcccgacaccctcagcccagaaagcccagaaacctcactgactatctgagttttgcacagattttctattcacacacagagtgaccctgcagaaggcagccactcaggggcctctgctgcgccggtagtcaaacttcgtaacaccaaaaggagttaagatgcaactcctttctactctagccctgacctcctccgttcgcaatcttccccagggctgggggcagattttcctggttcccccaggaaaagttttgtgcaaagggtcctgaaagcagtgaaaggaaagcaagctgaggctctacacacttcagcagaacaggtgaaacatacatgttgaagagacagagtctcactatgttgcccaggctggagcgcagtggtttttcacaggcgtgaacatagcgcactacagcctcaaactcctgggcacaagcgaccctcctgccgcagcctccgcatagctgggagtacagccgttgtgcccagcttgaaaaaccgttttgaggattatttattaatatgatctgcaaaggctgaggaggtttagaaaaagctactggttttgaaatattaggaaatgaaagcttcatgattttaaaagacacatgtctggagaaaatcttctccatctgtacaattttgtcatttcaagaatgtcacataggctggcacagtggctcatgcttgtaatcccagcagtttgggaggccaaggcaggtgaatcacctgaggtcaggagttcaagaccagcctggccaacatggcaaaaccccatctccactaaaaatacaaaaattagccaggtgtggtggtgggcgcctgtaatcccagctacttgggaggctgaggcaggagaatcacttgaacctgggaggtggatgctgcagtgagacgagatccactgcagcctgggcaacattgtctcaaaaaaaaaaaaaaaaagaatgtcatataaatgaaatcagacagcctgtgacctttgagattggctttttctaactgaaataatgcccttgagatccctccaggatgttgcctctatcaaaagctcattcctttatattgctgaataatattccatgattcgagtgcattaccgtttgtttagcaattcactcactcatggaaggacacttgcaatttttcccacacggggctgttacaaataaagctgttaggagcaatcgtgtacaggtttttttgtacatacgttttcatttctctgaggtaaatgcccaggagtgcaatgactgggtcatctgttaggaggatgtttcgtttttgaataaactgacaggctgttttccagagaggctgcagcactttgcacctcccaccagagacacaggagagatccagtttctcggcggcctcaccagcatctggtgggtcactattttttattttagtcattctggcagatgtgaagtggtgtctccttgtggttttaatttgcatttccctagtggctaaagacgctgaacatcttttcacgtgcttgtaggccacatgtattaatattaataaatcctcttcagtaaaaggtctctgcatcttttgcccattttcctttttctttttcttttttttttttttttgagatggagtctccctgtcacccaggctggagtacagtggcatgatctcagctcactgcaacttccacctcccaggttcaagcaattctcctgcctcagcctccaagtaactgggagtacaggtgcccaccaccatgcccagctaatttttgtatttttagtagagatggggtttcaccatgttggccaggctggtctcgaactcctcacctcgtgatccacccgcctcggcctcccaaagtgctgggattccaggcatgagccactgcgcccggccctcttgcccgttttctagttggactgacagggttattttacggttgtgcttgagagttccttatctgtatatatagatgctttgtcgcatgtagtttgcaagtattttctccctgtctggggcttgtctttccattcctcccactcccagtttaagggtcttctgcagagcaatggtttttaatgttgttgaagtcaaatggatggaccttccctttcacagactatgcttgtgattaccacatctaagacctctcttcaccaagcccaaggttccaaagactttctcctacgtttcttagaaaaggctttaagagggagtctcactctgtcgcccaggctagagtgcagtggcgcgatctcggctcactgcaacctccacctccagggctcaagcgatcttcctgcctcagccttccgagttgttagactacaggcacacatcaccggctatttttttttttttttttttgagacatggtggagtttcactgttattgcccaggctggggtccaatggtgcgatctcggctcaccacaacctccgcctcccaggttcaagtgattctcctgcctcagcctctggagtagctgggattacaggcatgcaccaccacgcctggctaattttgcatttttagtagagacggggtttctccatgttgccaaagctggtcttgaactcctaggctcaagccatttatccacctcggcctcccaagtgctgggattacaggcgtgagccaccaggcccagctagaaaagtcttataagtatacatcttacatttaaatctgttatccaatctgaattaatttttgtataagctgagaggctgaggctgaggtccacctttttgtctacaacgccccatggcctcggcactgctgactggcttctgcgcctctgtcaaagccggatgcccacacttacgtgcatctatgcctgggtctcccttctagtccactgatctctccagcagcaccacgctcggcggagcccagtcaatgcagtcttgatgactgcagctttaatcaagtctcagagctgggcagaatggttcctcccactttattcttcttttgcaacgttgttccagccattctattctagttcctttgcctttccatataaacttgagaacaatcttggtttaagccataaaaattcttgctcagattcacatatgtaattttagtaacattttattaatccagtacacccaaaatattatgtcaacatctattaatataaacaaagaaaagatacaatataaaaaaagtattaaggaatttttttcatactaagccttagcaatccagtgtgtattttaccctttcagcttcttaatttggaccaggcacatctcaagtgctcagaagccagccctggtctggaggctcagggagtttttgttgaagcaggaggagcatctttcccgctgggcacacggcctcgtgacaatattaaaagcactcagggaaaacccactaacggaaaaagcaaacgtattttcaaaaatatgcgccgcagaaccatcctgaaaaatgctgtgggtgggcttcagggggctagcgggtgggtggagacggactctgactaagtcagtttgtgacaccctgcagattcccactctggagtcacgacacacacaggcacggcagaggccccgaaaagtccttcaacaaaaatctctgctgagatgtgttctgtccagcaggtgcccgaatttatttgggcaaagagcaccttttgcacacgctgatgaacgtgctcaagaaggatggtccacactgcagactcccggggtcagcaaaggggcagggcctggctttgctacaagatagaggactagacaccaggcccagggtgtgagtctgcctctgctgtttaccagatgagagagacctcaggtgagttatggcccctccaagggcctcagtttccttcccttacagtaagaggggtggcctggtactcaccaagtccctttcagttggcacaacttccaaatttcagttcattgttactgtctcataaagtagtgttaaaacacagatacagacatacagataaaacacagatacagacatgtagataaaacacagatacagatgggtagacagaggttttttacccagcttccaaggctgtgatgaaatggcacaatacagcaaccactcctcactgcctgctgcccagcagttaaaaggcatgtgttctacaggccggcagtaactccctttctttctcatttcccattaaatacaatgctttcttccagcctcgtccaggggttctgcatgccccaggagtgtttgggggactctctttggccctccattccccccacccccaccccccaacctcctgcaccaccacctctgcctctgcctggggtcaccctctctgtcactgtccctcttaagcagcagctgccattgttaaagccacaggctgtccctgtctgggcccatatccttcctcccctactggagtgagcccaccaggaggtagggcaggattgcgtcgcaggcctgcactcgcagggctcagtggctcagtgtcggacacctcattccctagagatgtttccaagagctgctcactgaccctctggttcccaatctgggacctgtaggccaacagtgggtcacgaaagtagacatgagaagcccactgtccctctccacgtgtcttgaaacatgacagaaactaacagtggtcctctgttgttaccactgacagccaatcagcagcctccttcctggatggttgctgctcctccagacctgctgcgtttcatcacctctccagcacccaggctcaggacgtgcagacacaggggtgctctgaccggccctgccgagtacagtctctcctgtagcatgccggcctccacctgcgcacacctacgtgacatgaccagaaccctccttggcccagccccgcccatctgcaaggaaggccccaggatacaatggaacatcgggcccttttatttccaagtctttctttttgtcttctctaaaataaagcaaatagctattatatagctagaaatagtacaaggttttcttaagagtatttcttttatgatttcttctcttttgtcactttctgaacctcttggtttcatccaaatggtatctatataaacagctttaaaaaacaaaaagtgcccctttccccttccccatttgctatcccattccccagggcggccattcaagcctctttctgctgtatctgattctacatctcaaaataacatgcttctctgagatccctcatttctcaaacttggatcttgcatttttacttcttatggcagatgaagggctagctttcttacattctcttcccctcccctcatttcccagtatgattatagttaaatcgatgtatatattatgactctgaaaatattggctgccctaacaagttcattattaaaacatttttttcttcaaaagaaataatgaacttaaacaacttcattatcaataactttaattgattttttatatttgcttaggccttattttttacacttttgacacataatcagttgtacctatttatggggtacaaactgatgcttctaatggatagtgatcagatcaggggaataagcgtatccatcatctcaaacatgtatcatctctttgtgtcggaaacattcaacatgctgtgcacacattttgtttgctaccattgtgcgggccagaggtggtggttcaggaggtcgggggatggtgagggccaaagagagcacaaaacgcacactcctgggcacgcagaaccactggattcggctggaagaaagcactgtatttagtgagaaataagatgagaaagaaaggggtttatagccagtttatagaactgtgctaggtggcttcacgtgcatgtggcttgtttttgctgcctgtgtgcaggttttgtgtgctgcacgtgcacgggttctgttgctggtggtggtaggagggaaagacacccatagctataacttcccgcaccctgcgattgcgtctccttacagtttttcaccgggtcagaccaacaagatggaccaggggttccactgtgtttcctagcacctctcctccttgtcccatgccctcaaggtctgacagcagctgcatcctgggcctccccttccacatcagcctgggggcgcctggttccttctcctgcatgtgaagctgtttcctgagcctcgttgctcccctttccttagtctactccccggatctggaaagcacattttcccgtagtttccgtaggagggcgcatgggggtatatcttgtgggaggatttgtcatgtctgtgaatgtccttattctaccctcacacctcggttaggctgcctgggtacacggccactggtcactttcactccgaacgcccaatgtccaaggaaggactccatggtccgtcagcttccagcgtcgtggctgatgcatctggtatctttcctgccagcaaatctcctctgtgcagctctctacctccagaatctttcagaatttttgttatagctcccgtgacctgaaattctgtgacctgctttgatgctgtgcactgactgggccttcaaccatgcccttcagccctactgttttcttgtactgtttatgatttcttctccgttctcactttctgaacctcttagtttcatcaaagatgacatctatatttctcattttcacatctggttctttaagagggagagaaaggtgtgccctctaccatcttaaaaatggaaactctgctgggcacggtggcttatacctgtcatcccagcactttggggggccaaggtgggaggattgctgaagcccaggaattttgagaccaccttgagtaacacggagaaaccccatctctacagaaaacacaaaagttagccaggcatggtggcacatgcctgtagtcatagctactcgggaggctgaggtgggaagattgcttgaacccaggaggtagaggctgcagtgagccgaggttgcagtgagacgagatggagatcgcaccactgccctccagcctaggtgacgaagcaagactctgtctcgggaaaaaaaaaaaaaaaaaagcaaactgaggtagtgtagactctaccacactgatggctgctctaactggctgtcctgtgtttgcttaatttaaaaaaaaaagggcgggaggactgactcctacttaacgatgaggcttgtgcgaccctagagggcttggatggtggagaggctgtgagtgctggtttagcgtatttcaaaaagcagacagaatgagaataggcagagagcaaagcctgcaggtcagatgtgctgggggatagggacccagggagacaagaggcatccagatgacaggaccagctaacagtcagagttgaggcggcctgctcagaacaaggaccctgttgacctcttgcctaacgtggtgctaaaataacatttatgtttttggtcacaataaaagacaaacctactataactaagcagcatgcatatatatatatatatatatatatttttttttttttttgaaacttacaaaaggccagaggccagagggttacgagacacctgaaacaccccttctcaaaagcagactctggtccagtgagtggacagttaaaagtccaaccgcatttgcatcctgcaggccccacccacatcaagaattaaggaccctgaactcacagtgagtttgccgtgagccgcatcacttagtcaaggtttactgatgacgcctgcagtaggtcagcactcagagctgtcaggtgcagacctggaccacgatgaacaaggagatcggtcaaacggagccagtaacagatggtgcatctcaggcaaataaaagcatcctctctgagaaagccgagctccagttttatgtaagggtatggaagcaaggaagagctgagccgtctgtgctcatcagaccccacgggcttggaggactccaggacaggctgacacctgtcatcccagcactttggggggccaagacgggaggatcgctgatcttggcttctcctgctctgagtaggattcatgtaggacgagtggcttcagcagggtccctgcccaatcccaggtcctctccacccgaagccatccttactgcctcctctggaaatcccttctgccctggagggtccctctcactgcgtgctccctcctaagcccctttgctgtctgcacctcccctccagagcctccacagggggtaccccaagctggctacctagacctccgtccctctacatgcagcacttacctgccacccccaactcccaagccggcatcctggcggcccctcgccctgccaggccccggacggcagctccacctgatgcctggaaccaggagcagccaggctctttgagttttgccagtatccccatgaaaatatttcctaaaatgccactccctgcatctcagctgacagtataaactgttcatccctgttttaaacagctgcaagggacatcatttccagcatactgtaaatactgagttaaaataaaactgccatgtcactcttgtaaatatatctattagaatctaggcacggtgacgtgacagccatggccatctatttacaacgcacacgaacaagctcttcttaaggccagaaagtatacacttcttcctctaggaactcctatttctgttactacaaaatgtaaacccaacgttatatattcatgcttgaaatcactctattgattcaccctactgtaactttttgcaacacaaacatgcatataaattgaattcgtcttgatttcctacaaccatagggctgtgctaacgtctcccgaatcatcaccgcagtacactcgtgtgtagcttcctgacaggattctgagaaatgcattgctatgggattttgtagttgtgcaaacatgatagagtgtacatacacaaccctagatggtatagcctactacacacctaggctatacggcccagcctacgactcctaggctgcaaacctgtacagcacttaactaacggaatactgtaggtacctgtaacacaatagtaagtatttgcttatctaaacatagaaaaggtaacgtaaaaaatgcggtcctatcatcttacaggaccagcatggtatatgcggtccaccattgaaccatatctccttttcacagtgtgactacaattggaacaccactgatcaaaacagaaatagtctccacttcgataaatcatcatctgatataaaagctgtgtttaatagaagagaaagagcttttttcccctaatcagttcacatagcatggacaaatgctcgcctctgtccctattcctctttctagaaatgcgagcacagagaagctggttccagaaataaggagacgggagcagaaggggcttggtcacagcagagtcccccaatgccacatcctcttgagttctgagcctgaattcatcaaagatcaacttgtcatcaacgatcaccatgaacaccgctggtgtagaggctcccgcagctgctgcagacctgtggcccacgggggagccactccccaacacccttacatctgctgggaccccgcagtttccacaccccagggccatgactgcaagaggagggacctttccttaggaggagccttttgaggagcggacgtggccccggggcagggtcttctcccactctgagggagagtttgaagatgtctgctctacagggcccctgaatgcctcaggtcacctgcacctcagtaaatagtagctccagtcacccaccatgcatttccaaccaaaccagcagcaggcctgcctggctctggaactaggctctgtcctgccccatctccccttctgcctccgagttctgtggagtggaatcatgcagggcctggattccagtgatgccagctccattccccacacacagccaaaagatgcagactctgccccgccactgctcaaagcccctcagtggcatccacaaggcagtcagaagaaaatctctgcctggtgcatggcccctgctgccccacctccatggccacactggcctgtcccatcctgggctcatcccaccccagggcctttgcatttgccaccatctgcctggtgggggcaggcaccaccgcacccacctccaccagaggctccctcacagcactggtctccactgtggcccctcctcagacagccccttctagtcccagcccccaagtgccccatcccctgcccgccacctgcctgccctccttcctttcttcatgctcttcccatcgtcttacctgagagttttatgattttctgtctacaccacctccactcccctgcccagaacattaggtccaccaggtgcagccctctctccattcactacagcgtgggggcacataacaggtgttcagtaaacattggtggaaagaatgcatgaatggccgaatgaatgaatatctgcccacaccagcactgtgaggggagctgagcagggccatccacactttgcaaatgaggaacggagtctgaaaaatcatttaagtcaccgctcaccatcccaacctcttgagcgcacgggtggaagacacagttgccttaaatctcccttcaatctgcaaaatggcaggactgttctttcctggccttctgtacagataatgacatcgaaaatgatatgagagccacatcctaagtgaaaagagttctttgtcaaatataattattctaagacaagctagcagccttccaactacagttgatttttaaatttatttatttgtcttctggagaaataaccgtcccgcctgcttccaaaatggaacatttagcttgttctttgctggctactttgcggcaaaaagtatgaatcacagatagaagaaaaacaaactataaaaaaaatggtgtttttgctcttgaaagtctaaattatagagctactatttcttaatcgttcaccgtgaggcagcgatgtcaggaaatctggggaaggagtgaagcagtgaaaacgtggaacacgtgaaaatgtccgagcttgaaacaaaatacggtagtggtgtgtgcaccggggtgggatcaccacccttatcgagtgttgacatcattgcattctccaaggagaactgtcactgctaccttttaaggtacatcacaaagccagtggctccttcacatgtcaccacccttcaggaaccaagctaggttctccaaattcacttgagtctggcttaagccaatgtggtttttttaaaacgagtgttggtagctttaaatacacacacaggtccacgtgtctctgatcacacacttgtttctaccgttttaaactccctttggggacttgggggtgaggggcaatttctgagcatttgtgggggaaaaaaccatccactacattagggggttaagaaaggtaaatgggtgataactctaaccaccagataggagtgtttatttccatgagttttcatttctattttctcaaggctaacccctgcgtgaacacctcccctctagcaggacgctgcgcgtggcccccgtccccacctgtccacgcgaggcgggcctcacctgagcggccgggcacgccccgtccccgaacggccacccaccccgggtaggcacgcgtcacctgtccatccacctcgctaccttctctctgccaccaaaaggcttacgaaaataaggcgcagggggtctgggagaccccatcaccaggactcagcttctctaaacgcggggttgggggtccagggacccccccgtgcgacccgcatgggctgtacccgagggcgggggataacgacatcccctggggcctcggcgacgacgccgcccggcggcgggggccgcggggccgcgggccggggcggcgaagaccctgcgccgcgcccacgggcgagcgcggcccggcagccccgcggccccgcgctgggcctggccgcgggcgggcggggggcgcgaggcaggggacgggggcgcggagcccggccaggagcgcccgcggcggcgggacccggcgggcgggcggcgcgcagggcgatcccggagcggctccgggaaatccagccgggttttgactccgatcgccaacggtgcccgcagccggcgaatgtaacaaagaacagtcggcatggcggctggaccggggcggcgcgcggctgccgggcgcggggggcggggggcagcgggcccagggcgcgccggggctcgcgggggcagcgggtgcggcccggggccggcggggcgcacgccggggcgggcggcgggcgcagggcccggagctttacctgcctttggaatgtgcagagcgggatcggatccggactccgggttgcgatccgctccggaaactgcgcagcaccggaagccggggggcggcggcggggcatggcgggacttgtagtccgcgggcgggcgcggggggcgcaggcgagaccctggcgcggccgggggtcctgcgggtgggactgcggggcgcgggcggcgtggacggggcagcgggcgcgcgcggggcgggtctggccggagggaattccgcgcgcggcccccctcccacgtggcacggccctgccgcccacgcgcgcgggcagctccctctccacctctcctcggacgcgtttcttgcggagttggggagtggtggcggtgggtgggtcgagtttttctctagaacaggcctgggacttgcccccactcacggtgacctctggatttggccggcggggccctgggacacgagctctgtgcccgcgaggggagtctggcctggcgggctccgccacgctaccggtgagcaccgggccagccgcggacctggctctccattcttccccgggggcctgtgtggcctctcttgaccccctccaccaagtgtgtgtgccatcacaaaacgtgagacggagaagggacagacttttcaccttagtcctggccgcccatattcagagaggccgactgtcttgttcattgctgcctggcaaaaacctacattcataaagagaagtgatgaaccggggaaaatgattttaaattgatgccacaaaagggctcgtttccctcatgtacgtgaaactcttgtgaaccaataaaaatatatatgtatatagaaaaatgagcaaagtgtgtggatggacagttcgtaggaaattcaatggttcttaagcatatgagaagctattcaactacgctgcaataagagaaaaaaagtcgcagtgggatcatttttattagattagcaaagattttttaaaacgtttaatacaacctgggcaacatagccagaccttgtctctaaaaaacttagctgggctcggtggcacgtgcccgtagtctcagctactcaggaggctgaggcaggagggtcacttgagtcccacagtttgaggctgcagtgagctgtgatcgtgtcactgcactccagcctgggcaacagagtgagaccctgtctcaaacaaaaacaaacaaaaaaaagttttaatagcataattttgaagaaactagagaaacaagctcctttacgggtaggagaataaattagcgtagtttccattcagatatttgtggatatccataaaaattctaaatgcacatagcctttgacccacatgcaggaatggtgccagagacggactcgcttgtatgaatggcatatgtgatcatcacatttgcttacatactacgtgccatcccatgggaagtgttggatgcacctgggcacatccataggctgcaacgccgggcagccggagacagattaggcaagtgttgatctgtgaaggctggtttctctgcctggcccagcattctacagtggcttccatgttgcactatagtaggccatcccatggccccccagacctttctggagcatccccggcgtccactgtctccctgcttgtccccacctgcgacttcatgcctccctccagcctcctgtccctgaagcctgttcccaaggccttctgtactctatcttcaaacacttcccaggttttccacaaccttctctgtattcaggtctccgcccaaccccactcccaccaccaccactacagctaatggacattccctctatacacgcacctccagtgacatcactcacagttccaaaatggccagatgactggttctgtgggcctcaggacatgaaacagtcctcggcatatgtgaataaaaggttgtttacactaaaaaagtgacaggtccacagcaagtgcgaataactgaaagtaaaccaaagacttcaacctcccccaggccatttctcctattactacatacagcccacggctggaattcacttacacaataatcgtcatatctcgtcttcaagaggattgtcaatgtgtccactataatccttcagaacaatctagaaataatacctcttaaggcagattcatctccaaaatgttaaaagaaaaaaaaaagttttatcttaaagtgtcaaattttcattattaacaattaatgcaatatacaactttgaaaaatgggcagaaagaaagaaaaaacaactataaaggttgttattgaggaaaatggaaaatctgaacgtgaacagtgataccggataatagtattggatcaatgttaaatttcccaagggtgatcattgtattgaaagtatggtagcccgtgccattcattgttctcaccaaattgttctgaaggatttagggtgaaatattgtgatatctgcaaacgtgacagagaccgagagagagcagatgtggcaaaactggtgaatctaggtgaaggctatatgggttgttccgtaggtttgaaattaaaaataaatgagttgaaaatttaaaaaacaacagacaagagcttccatggctatcagtgaatttccttgtgaacacttaattcttcctgaaagatactagatgggattaagatgtaattaatcactgagggctatgcccgcagccctgtggaccgcccgcccgcccgccttagatcagtacttttccaattagcacgtctcctgggctctggttttgttataattcaaatacaaacctactgctgtgcaaagcatgatagacatcctcaaccacctctccagccacctccagcttttaagaaaaaaaaaattggctaatttttctcataaagagggaagtctgatcatcagcgaataagttaattcctactaaatatgaaacattgactctcacttcatgttattctcacccaaaacaggcagcattaaagttcaaaaaagaccatatatccttgaagagtaactgctgaacttattcactggcagtgggccttatagcacagtgaatgaccaggttagagacatgcttcacatttgcttacatacccacaaattaggggatgatgtatctggactgtctagtagaactttatcataggagtatgtagattttccatggagtgctgttgtgtgacttgaattttagtcttggccctgcctctgacttcctcagtgatttatcctggttccagggaaggagaccagccttttcctcatgctagtctttggtggtttttaaacatttgtttaactcaacaaatgaaatgtatcatatgcctgacaccgctacaccagtttttttacatataaaattgttaaaaatttttggccaggtgcggtggctcacgcctgtaattccagcactttgagaggccaaggctggtggatcatttgaggtcaggagtttgagaccagcctggccaatgtggtgaaaccccatctctactaaaaatacaaaaattagccgggcatggtggcgggtgcctgtaatcccagctactcgggaggctgaggcaggagaatcacttgaacctgggaggcggaggttgcagtgagtcgagatcacgccattacactccagcctggatgacgagagcgagactccttctcaaaacaaaacaaaacaaaaaaacatataggaccatagtccttaatctctccaatcgacacaggcagagccagagactcacggctgtgagcagaggttctccaggcaaacagccagtgctcaaattctggtctagccagctgtcagcttgggcaagttacttaacctctctgtgcctcagtttcttaacctgtaaagctgaaatagatcatgccccatggagttgtttcagagagtatatgagtcactacatataaaactatttgaaaaattcttggcacatattgagtgtgcaattattattagctattgttgtgatctcaagtctttctctaactttatttattttattgagatggagtctcactctgttgtccaggctggagtgtgtgatctcagctcactgcaacctccgcctcccaggttcaagcgattctcctgcctcagcctcccaagtagctgggattacaggcatgcgccaccaggcccagctaatttttgtatttttggtagagacagggtttcaccgtgttggccagactggtcttgaactcctgacctcaggtgttccgcccgccttggcctcccaaagtgctggaattacaggcgtgagccaccgcgcccggcctattatataaaagctatgcttgctaccgagctagactataaattaatacatcccctgggcttagtccagtgcttcacctggtacagcaatgatgatcaccagctgataacccttctattaaggtgcccaacgtacctgcacgtccaactttataaatatcgatgacattaatatagacctataaatacataggcaactagttttgaatgcctgttacagcagggcgtgactcgcagtttccactgtggacagtcacagtgtggagctggggaaggccagtggaggaaagctgtttctaggtcatgattgggaaggagggcctggccttggcagctttctctctagggggatcactgtgctatgtcagccatcctggtgtctagccccctttggtgagtgatctgcattttaaaaataaactttattgacatatacacacatcaccctgtctttgtaggggtgctaaggtcaaaacagcatgtggtcatcccctccagtgtcctgctcagtccccagcaccaggtcctgggcgatggagggtgaggtgggtggaagcaaagctgctgtctgtgctcacgtaagggtcatcagctgacctttgtccttgctctgctaggtgggcagtgactgtacgaagccccgggggatacaggaaatgagagcaatgcaggacagtgaagcctgagagccggaggcctggaccgtgccgctgcaagcacgccaattccgcagcctgcagagaagctccttcgtggggaaggcagggcttgagttgggttagaccattcgaagagtgagtgtgaactgctgggcacgaggatgcacactccagaatgaccgagggtggttgagttggattaatttgggcagtggagacgcattggcaaacagtgctcatctggaggtgatcagcttaggaaagttggtaaattaggacaagcttggcctccagcaactcaatccagcctcctcctggagcatcagcacaaagtgggtccctctggccacacagaggaagcaacagttcaatcactgggtcctgaaccacttctaactccaaacaagaggcactgccatcaccaccttgtggtgcccaggaaatggagcagaaaacctggaacccagctgggaagcatcgggctccctctaagggtctacacggtgtctagcgagcgggcgggacagctgagaggaggggtgggcagtgtggggacaggaggctgggcctgtccagtagctttctccaggacaccagctctccacgtgctctgctgtctgggcaccgcagggggaatgaagactgagggagaccacgggaactgatgactagaaagaaggcacgatgcctgcatggggcccgcaggacacgtctgtgacccgactcgaccgcctccctcccagaaccaccgtgagccccaggcaagtgccgacgctgttccacctgtggctgagccaggtacctgtcccctctgcatgcacccgggccacccaccggggtggggaatggacagtgaagtccaaggatgacctgatgaaaggggcgctcagagaagaccctgggacttccaggacagaacaggactcgggaaaaacaactcagtgtagtgttctgtgtgcacatttatttctttcaaagattgtttgtgttccagccacatcttctccaaaggaacccacccaagcccgtgtgcaggcttgctgcagggctgtcttcggcgtttaaagtgctactgaggaatacaatcattgtcacgtaagttcatcaccgcactccagcgtcaggccaaacctttccgtggacctggaaaacctgccactttcttctctttttacaatgcagtttcgacataacattggtagagtaaacaacaaaccacaagcctaaatgatgaatggtgcgctgctgcccagctgctaactgagagaacgaggcagtgtattgtgtttcgaatgcaaacggtcatggacccaagttaacctgagtttgctctgcaggattccgcgggggccttgccctgtgcaggctgctttggtcttcgtgtctaggccggtttggggcagtggggagagggcctggcagcagggtttacgccagccccgaggtctgttttccgtcagacagagatacgtgtcctgccttccaccatccaccaatttgtactctgaagtttccagatcaagagccgtgagattactacccaggaaacacctgccttcggtggccagcagtgtaaattaatctttccctctctgctcaaagcaactttgcaactctcgtctatagaggtggccagtaaaacccaagcaaaaatctaaacgggcaccaggtggccactgagtggcgactggtcgagtagcagttggtcataagggatcagggctggttttgaactcagacttgaaacttgacgaaaataaagtgctctgtcaaaactctcacagcaggttttcagctggaacaaggagatggctactttttgttattgctacaataacacacgcgtgtgtgcaaacacacataacacacacacacacttaaagctccatttcactcctccacaaagaacagaggcacctccttaaacaaagcaaacggggaagggttgcaagctcattaaaaccaacatgagcacccagttccagagatacagacacaattaatcttagtgttcatgaggaattgtttttaaaacacaactgggcaaaactttcatccagacaaaagccaaaaacaaaagccctcaagccacaaaagcttgtagaagaggtgaggcgataaaggtgatttacacatcagtatttttagcatttggtggataatcttaatttatctttaaccttcacaacatttactttgtcataaataccctacaccatgaaaaaacaaacctgtataaaacagcttggaaaacaaacattcacagtatcaatacagcccatttctcacggtgctaccctgaagctagccgacgtgttgcctttgcctttgcttcataaactccctcccatgttggtgttttctgtaacttcagaaaaggccattggatggagacaacgtgtgcgtgtctacaggaagcagagccctagaccttggtattcaacagtaagcagcgctcatgggattcatctggaaatggaatagttaaaacctttttttttttttgagagcaagaaggcttaatataaaatcctggggccggcctggtggctcatgcctataatcccagcacgctgggaggccaaggtgggtggatcacctgaggtcaggagttcgagaccagcctgaccaacatggtgagactccatttctactaaatagaattagccaggtgtggtggcgcgtgcctgtaatcccagctacttgggaggctgaggcaggagaatcgcttgaaccaggaggtggaggttgcagtaagctgccattgcactccagcctgggcaacagagtgaaactccatctcgaaaaaaaaattttttaaataaaaaaaaacttctgatatccttgcacttgaatagagtgcacctgaattccaaaatcaaataaaaaagaacaattaaaaacttctcatcagtgtctgaaattctgacacataatatcctcttggaattcttaaatatgtctcagcctctttttaccacatggcaaagagcagtaaaacttcaagtaaaacattaaagtgaacatctgtcccatctgtcccaaaagactaacagtgatgcctgactttggggacagaaacttggtagtattcacatgttttgaaactccaggtgctttttttacaatgattaaaactggaatataatttttaaaaacaaagcaggttggaaaagtcattttaaagtcacttgataattcctggaacacctaagaagtttgtaatgcgcattttaaagtgaaattcctaatgtcgttttctaatctctctctctaaaaaagaagaaaaaaaaatcctataattttggtttttatacaggtttttactaaaaaagaaaaaaatcctataattttggttttcatataggtttttactaaaaaagaaaaaatcctataattttggtttttatataggtttttactaaaaaagaaaaaaatcctataattttggttttgataccggtttttactaaaaaagaaaaaatcctataattttggtttttatataggtttttactcaccagtggctctattacccccgaaatatttaatgtttaaggattaacaagaggctacggaaggaagcttgcccatttccgtctccatgacagaagccaagctttcgtaacagccttttacatgtctttggagaaaagtgaatcatattaaactgtcaagaacacttcaccccaatgatgactgctctttgaccagcatgtctactggaagtggcacattcagaagtgagatctgtgaatgaactgaaatagaaaggcaactgatgaggaaagcgactggaatgatattagggatattcaaatggtgtgccaggtttgtgatgttttccaccaaaacaaacccaaacaagggcaccccaacctgtgtccaagaggactgttcacagcaaaattctgaagcgctcatagaaggaatgtcctgcgagtttggcccatttgttattaaacttccattcctaagactgacacctgagacacaaaataatttcctctattgccctaaaaagactttgttttggctactggcagcacttggcaaaatccatgtatgtgtttggttactgtgttctacgagcggtcacgtatggctcctgacttcatctgacaggcccgctgtgctcttgtttagcaagtatgacaggcaggaaaaaaaaccctggatgtcaactgctccactagcattattagagcttttaacacgatagagaaaaatgtaaaaaccatgtgagaatatatatatcttccacttgcaagtaggctcaaagtaaacttagaaaagtgttctgcatactatgcataggatatagttagtgttcaagttctatggctaatatcaaaggtagatgacttcctacatctgtcgtagcgtctccattcttatcaaaatttctctattaatccaaaatcctgcctatgttccacttccctgtactcagggccagctgcattttttattccaagcagcagatgaagagaggtgacccatcctttccattcacagtgacagcacaggggggcacctcctttttgtgacatggtccaggcatggacccaaaacaacacttgttagtgtagaataggtaaactaagtccctcaaacctgccctccacaatctattagagcatattatttcacttataatgttaatctccttctaatattgaaccctaacccttagctatgagcacagcccaagctctgcagctgtcaagtctcatttagcatctggtggcaagttgggcttttttgtcctctctgggagaagcctcctggctggagactcagattttgttttccctttaaatgacgagatggttggaagaaacccagcaagacaagcggggcatctggacatccggcggacacactggctgcgtcctggtgagggtagttaacatgggtgcacgtcttctggcttggaggtgatgacctcaggccctacgtgcagggctccacgggggcaccgttcatggtgttcttgtttctgtgcctggagagcagcttcttgttcaggatcctggtgagggtgatgcctttcctccgggaaccctctggctgctccaggaacacaaggtcattgtgtgactgactcatgcctgggtctttctgttgatgccgccggcggaagaacagctttgcacctttccttagaattcctcctggaagagggaggcacaagggctggtcaagtgggcagggaatgaggggctgaatgactggtccaatcggacaaagggaaaaggaggctcgaatgcctctaacgaagggccagtttactacttcaatatgctgtcactacctgcatgagaaaaataactggaatctggcttgtacaaaacgagagttttcaagatgaaaaggaaacgagattataacagtagaagcagtaagcctgaactatcgcttgatatccctttctaaggccgatatttatattcctgaattttttttcttttttttttttgagacagagtcttgctgtctgtcgcccaggctggactgcagtggcgcgatcttggctcactgcaacctccacctccaggttcaagcgattctcctgcctcagcctcccaaatagctgggattacaggtgtgtgccaccatgcctagctaatttttttgtatttctagtagagacagggtttcaccatgttggtcaggctggtctcgaactcctgacctcaggtgatccacccctccctcagcctcccaaagtgctgggagctgggattacaggcatgagccaccacacctggcttatatccctgattttctatcagaccaaatggaggcagacagctattgcctcggttgggatacctgggtcccctctgtgccacccacttcccctcattaggaagggtgtagctggcaaagcagtactatgtcccagaaaggatggtcacactcataaaacccaattaagaccctgagaacaatggtattcactttcttaggaatgttaaataatatttgctcttttgggaataagattttattaaaaaataattccagatcctatcatattaggctatgccatctgaagtttgttacttgggcatatttggcctacaaaacgtcaattttgtgtggttcgatgtatctgcttacagatagatacagatctctatatacagatatttacctggctatagatatccatcaggtagtagaatacggaatagaaaaaaattagcagcagcagcaacaataatttcaacagcaatgattccttaaagatcaagtacaagctaatgtagtgggtgcaagagcccactaatttgctttttcacagattagtttaacatcctattaaccaaggctggcaaggtcgagggagtaagcatttcaggccagcctgtgaaattcattaccgctggcatgtaggtggtaatgactttgaaagaagacaggtctgatcatcatgaagaggagctttatacctaatgtgataatttattccctttgtgataggcatatccaataaacatttcaatagccacgacatatgcaaatcgccacccatgttgaggaggttgaaggagggcacgaagaatatcaattccctcttctaaatgaaatgcacaccaacaattgtggcatctgagggcagtcggagaaacctgacctagacctgcctatgaatctttgtataatcaaagcctactatggggaaagaagcatgtgcccctgagcctgacttcaagcaggaactactgtgtcccatctgctctgcccaggttacaggacagaaactgagaagatgaaaggccgcaatggactgaatttaatttgatcaaagcggccataattttttaaaaacttgactctctcaacacaaccaaatcactttttatgacgtgtcatttggacattttttacagtgatctaaagttaggagcctgtgtgcaggggcttcggggactgctggaaaaggaatgaaaaaggtgggtaagtagtgacattttttacagtgatctaaagttaggagcctgtgtgcaggagcttcggagactgctggaaaaggaatgaaaaaggcgggtaagtagtatcaacgtgtaaatgatgtccctgttgtccacaggcctaatggcacacctgtgggacatcagtgtcagttcctggagtgagtcacgtccctgaaaaatgcagcacatcgtgaaaaaccagccatcagcagggtgtgttctgacaggtggataatgacccccaactggacatgactttggagtttggccagtggggcagatacagtggtgctgatgtggctaactgcctggtgtatcagagggcacctgctggggaaatgccctgggcatggtgataggggctcccaggcagaggaacccccagctgtcagggggctctgagctgaccaggtgacctgaggctgggggatgagggggacctcagtggtgtttctgatctataggcacctgcacctgccttgaagctctgctttaggctgatcttggaggccctgaagggcctatggacaagggctcccaggtggaacaggggagaggaaggggtggatccatcagcttcacctggactgctccaacgtcacccccttcacttctaggggaaatggaggcctagggggagggaacgccaacccaccccctggggtcaaccacagacccaaggactcagaacccccagcagtgagaggttccctcctgctccacctccaaagtccatttcataggcgtccctgcactgaagctggcctggcgtctgtatccaggcctgaggtatgagcagggacaatgttatgggctgaacttggctcccccacccccacccaaattcatatgttacagtcctaatccccagtacttcacagaatgtgaccttatttggagatggggtccttgcagaagtcatcaacttaaaattagatcattggggtggcccgtgatccaatatgcctgctgtccttatcaaaaggggaaatttagacacagagacagacacgcaagggaagacattgtgaagggtcacaggaaggatgccacgtgaagatgaaggcagagcacagggtgatgcttctacaagccaaggaacaccaaaggttgtcagcagctgtcaggagctggagaggcgggagcaggctctcccacagggcctcagaaagggtggccctgctagcaccagcagctcagacttccagcctccagaacagggaaagaattggctcctggtgttgcaaacacccagtttgtggtactttgatacagccctgggaggggagggggcgcatttggcttaaggatccaggaacgtccaccatgtcttcctgttcagtccttagaacccaggcagcaacatggaggagtggaggcggagaggacagtgaagcagcatcctcagccccgagccctccaaacaacaggcctctaaggacaacaggcgtgcaggcccttcctggagaatctggcatgatgggggtctggggacactgggcatgagcatttttcaaaagttcccaggtcttttgaacatgcagctggggttatccactgctagcccgggtctggccaaaatgccactagtgcttagagcactcggaggccacagccgacaacgcaggagcaggccagggccaaggacacaggcaccatacctgctctcctgcatgtcgctgctcatgctccttcgcacttcactctgggggccggcagaccacagggctgtgtgggtagaagctgacgcagcccacccgcagggcccggtgccacgccagagacgcgcggtgcgcccaggttaagagggaaatgggtgtggagacaggcaaggcacggctgtgttcaaaagaccttagaacaggaacaggagccaggcacggtggctcaggcctgtaatcccagcactttgggaggctgaggtttggagaatcccttgagcccaggaattggagactagcctaggcaacacagcaagaccccatctctatttttaaaaaataaaaaaattaaactttttttaaaagaaataaaatgggatatgcacattttcaagcagttatgataatttatgcaagtgaaattgtactacaagtgcctaaacctgggaggctgaggtaagtgttttgcttgagcacaagaattcgagactacaatgagctatgatcttgccactgcactccagcctgggtgacagaacaagaccctgtctctcaaaataaaataaaataataaaaataaaaactgcctaaaattctaattcttggcatattaagatgaaatagcaaggattgcagcctgcatgtaaaaagatggtagacaagaaagattcgcacggcatgtttgttttaacctcactccgggctccagtctgttgtctgtccataccctgagggactaacttgtttcagtggcagacctctgccccagggagctctgtgcctcttcttacaccctaccgagaggggctggtaacaaggttattttctgttcttccatcttcactcacgctctccagagcatgtctgctgttttgttaaatttctttttttttttttttttttttgagacggagtctcgctctgtcgcccaggctggagtgcagtggtgctatctcagctcactgcaacctccgcctcccaggctcaagcgactcttctgcctcagcctcccaagcagctgggattacaggtgcacatcaccatgcctcgataattttgtatttttagtagagacagggtttcaccatattggtcaggctggtctcgaactcctgacctcgtgatccgcccacctcggcctcccaaagtgctgggattacaggtgtgagccacggctcctggcctgttttgttgaatttcatagttcaacatcaatgccagaaaccagattatggtcatatgtgcccgtgtgcaaatcttcctgaaatcgtttgtgtgacttgcacactttcccctaacctgataatttgtcacagcttctagggggatggcatcaacttctcgaacagggcacagtcatgtgcgggtggggactgaggtttgcagttctgtagactggaccctcaattatattccccagccgcctctgaggaaggaggcctgatccctaccatttttagggttgcttttggtcactgttttcctacctataggattttaagacagattcctcaattagctatttatgtttgctagactctgtagggacaaatgaggaagctaaggtttggagaggtggctggctggggtcgcacactaatgggacgggtgtgtgacattgcgctttctggctctgaagtccatgttcccaggccctgctcttccatgctgctaaggacagcgtctgagaagtggccagccaggtgtctagaaaaatgggcaagtctgtggcccctggggaggagactccggagagtgtggatacatcaaagcccgtggggtctcatggagcaaagccccctaatcctgcaaggactcgggcgggattcccagaatgagttgcgtctccagagaggcatgcagggggcaggggaggaggattccagccatgcggacagaggccattccattccctttctcaatagcaatgggaaagcctgtttcgacttggaagcagattgttcactatcacctttggggtaaacgatgcagggagaacagggcccccagatttgccagtgcacactaaatagccgccccatggtggttgtgagggtcaaggctgagacaggagcacactcttgtctgctgggcagtaaccccatatggaatgtaccggtctgcccacctccacgagcaacacctgtgaggtgtcgctgtgtcaacctggctgcagcacccggagattcaacagaacacgcactgaggtgcggctgggaaggcattgtgtagatgtggataacaactccagccagtggactttaaggaaaggagattatcctggagaatgtgggtaggcctcatccaatcagctgaaggccctaagagcaaacactggttttccagggaggaggaaattctgcctcaagaatgaagcatcagctcttgccggggtctctggcctgctgcctgccctgcggatttcagacctgtcaatctcatgagtcagttccttaaatatgtaacctatgggttctgcttctctggaggactgtgactgatccagtaactgatggtctggatcaagcagatcatctgcttgactttgagcccgcagaatgtgttgccctttgctgatagtgaagttcacactacggtcaacaatagccggggccatgttgattgcatgaagcctgactacttgactccaggctaccttctctacgccaacagcaagaagcgagatttagacctcacccacaaccttcaagattcctgaagataatttggggagtggttatgtgaaattggaggcaagtaaccaagattttaaatgggagacagggagaagaagaaaagtctttccctggttctaacaaggtttaaaaaacaaatcacaagaaggctgaagtataaacaaatacgtgaaagaatttaaacataattaatctaaattatagctctaatgtcataaatatttccaaatgtattcctatttgtctctacagagtctaacagacataaatagcgaattgaaggttctgtcttaaaacccagcagaaagaaaaacaatgaccagaaaaaaaaaacaattgtctttggcttcccaagaacagcatcggatttcaactggaaccacagatggtccgttgatagaagcgactactttttagctctggaggacgacaaaaggaaccagcttcttcctgtgggtgtcacagcgaggtcgcctggccacatcaggtaccagagcgagcgccctcacctgataggccctgtacaacctcagccacagcactgtcaggaggaacacgcggaactagcaacctaggagggtaaaggcggagttgggagggaacacgaggcaggcaggtcggctggctgctgagctacaggctgcactcctaggacgtctacgtgtaattgagaaaaataagacaaaaataacttactgtgcaggcaattaattctggttggcatagcgatcctcttaagttaaagggaatgagcatgagatgaagagaagtaagaggcagaaagaattatgcaagagcaacatcagagtggacgtgggtaagggttctgagccatctacagacaccacacgcacacaggacgccactgtgcaggatatttggcaaggtttcttactgttccaagttttttttccgaaaacctcccttgaaacttttgtgcttacttgtggtaacatacccataatataccctcttaaccatttctaccggcacagctcagtggtgctgagtatatccacgaccaacttcactgatctttttttaaactaaaagtaaataaaaatttggggaatacatttcctgtgcgggctggtttccaaccagcagaacctcaggaggattcgaaatacacaggcactctcagaaaccgaatacaaactccttagcaggacaaaagatacaggtggttcttaaaccaaaaaaaaaaaaaaaaaaaaaacaagctttagtttttaaaaaaagacatcctctatcaccagttttgaaaaatgtttggttgaaaaatgaaaatgacttggcacccataacacagaatcgtctcagattgtgacagcatctcacagagatgctaattacaagtctctttaaaagcactggaaggaaacatttaaaactgctgccaagtatgtcctgttcaaaaacctggggtcaatgaggtaggggcgcaggagtgaaacgcacggcacggctgagcctctctgctgcattcccaaatgccgagcctccggcaagttctgagcctgcgttgcaggtggccagccccagcccccaacacacctgcccgacacccagtccccaaagggtggacccctcatccacctggcccgtgaagggagaggagcagggtgggtgacacagcaaggatggaaacccagggaaagacctcccggaagggaaaccagacagggggaaggaggaggggctgtgtgaaggaacacagatctttacatgaacagagtgagcgaggcttggcatttcagaaggaatgaggagggcggacggggggttgggttctgccaggacaagaggaaacgggccatccagtcaggtaagggagaggaagagctaccccaccctgcacccatgtttgtcccgcttcgcccagcactcactgtctacaagacaaagaataggccacaggtgtgtgtgtcaggtgaccaggtcacctttgacataacccaagccaaggcctcttaacaggagcacaggagcctgccacagaggtcagcgtgcagcttacagccctcaagtgctctgtggaggggggtccatgcatcaagcaccccaaggccaggcagtgggcaaacagagtccaacgggtctgaaatcttatccaggaaatttcctccttctccctttcctcttctaactttccatttcccccaacacctatcacgactctgcactggcaaggaggggggcatgggagagggaggccgccgtgccatggctgagggacacaaagcaaagacagggagagaggggaagaggacagactcagacagtccagcccatggcaggctgtgggctttggcaccagggacatttgggaccagagcatgctgcactgtgaggctgccttgtgggggcgtgtcctgtgcacggcagggcgctgagtggcatccctggcctctattcactagatgccgactgcaccccagactcccagctgtgacaactaaagtgtctccagacactgccatattccctggagggaaaaagtgctgggcttgagaatcactggtctatggcatcaagaacagaggacaaaaggcagcgacagcagcgcttaacaaagctcccccaaggagccccttcgatttcccgacacagatggtctcaggacatcctgagatttccgctgaaagccttggagccccacacaagagccagagccaggagttaatgctgagcttcacctgagctcacggcttggcctgccttgcccccagtcctgtcttctgcaccaagatgtccttttgtcccccgaatggtggagtcaggtgggcgcaggcagcggccatgctcctcatcttatggaggaggatgctgaggctcggtgagtctcacatctggaacggaccccaagcccctagactatatgtccttagcaaatacattcaggttactcatgccaaggcactgtctcggcaaatctgcacacgcttaaggaatttatagttttaaagcacggacttagggctaatggaagcaatcagtactaatgaaatgatcacctcctcagcacccacatattaagttaaccgattcattattcccaggagcttttctccctgtagagcctcctagggtcaggtggtgaggtctggttttgtttcaggtgcagggagactcttgacaggcacaaaggagcaaagatgtccatatcggcagtggaaggagccccaggctctgcctggctttgctctgagtctctgcagcccatcattgtgtacagctcttggtaacccgtcgggaagccaggtggagcaagcccagactgaggaaggggcctctatgcatggacacacactgaccccaaatgcagagatgacgccaaccctcccacagaaggaccggcagatgccccaccacgggttcaaacattcagcacagggcatttctggaggggcaggggtgaggctgggagggagtttgtaggggacaaagggaaggaaggcagatgacttcagcttggaagccagcatgagcgcaaagccaccaagtggggggcccgggatggggggctcgggagcaggtacctttatgctttttggcagtgcccggctccaagacactcatggagctctctgacagctcatcaccgtcggggtccagcaggacctggctgctccatgccgcggcctgtggctccttctccaagtcccaggagtctagctcgtcctcctggggcttgggggcaagggatgcctgggctgactcggcttcctctggcggggcagaggctgccgccctctccggatgggatggggcgtcctcctggtgggtgctgtccacagaggccgtgtagccctgcatcagggcagcgtcgtggtcctgagatagtgaggtctgtcaggggcagtggggaagatgacaagggatacatgaaaggaagggagggtttgaaaagaactgaaaagcactctccaaaacattctgacagctgatttcaaagtctcagaagatgcagccgtgggcctcatagaaggcgcttatacatcacggccgttgctcatgcttgggttaaaaaaggtctcccttacagccagggctcaggatccctaggcagctgggggttggcccccggggctcagaggttaaccctcttcctctcacagatgggcctagcggtgggagcgtttgtggcaagctgcagaaatgagatgcgagagagagagcccgtccttcagagtccacgacagcacaaaggaaatggccgtgggtgtttcgggtttagctgtctttgttcctacacgtttatgttacctgcaagtggaaattcaccggcacatcctctcaaaaattatattttgtgtaaaaatatttaagcactaaatgaacctctgagagtcgggatagcgcttccttggaggggggaaagtttggggaggagggcacgggggctcccttccttggaggggagaaagtttggggaggagggcatgggggctccctgagggccagtcatgctgttcttggtgtgggtggcagtgacacaggcgtttgcttagggacaactgtgctgttctgacttaagtgccagcctgtggaagcgcccactgactcaagattagataatctccccgtctctacttaaaaaagtacaaaaaattagctggtcgtagtggcgggcgcctgtactcccagctactcaggaggccgaggcaggagaatggcgtgaacctgggaggcggagcttgcagtgagccgagattacgccactgcactccagcctgggtgacagagcgagactccgtctcaaaaaaataaaataaaataaaataaagattagataatctgagcaccaataaaaataatcactgcggtgaattcagaacattaaatactaagatccaggagttctttgtgatttttaaatatgatcttagagaaagtataggggagatgaccacgagtcttgtccttattttgctcattcattcacccaagagcgaagaaaacccaactactgggccccggacttccagagaggtcatggatccctgctgagggcccctggaggggctcaggaagcccccaaaacaccacccgcctgcctctgggacgtggggcaaggccaccctctgggtacaatggcaaggttgatgactcatctctggcacctccaaggtcctgttctggcctgtctcccagccactgaggaatccatcttctgcgtgccctctgcccacccacccactcttttgtccagaattcttcctcatccccctcctactccaaatcaaaatcttcccaactctccctccacctgttcatttggaaatgtcaaaaaaaagtaagggccgggagcagtggctgacgcccgtaatcccaacattttggaaggccaaggtggatggatcgcttgagcccaggagttcaagaccagcctgagcaatgtggtgaaaccccatctctaccaaaaatacaaaaattagccagtctcataacaaattagctggtctcaaaataaataaatagatagataaaaattttaaaatcaattttaaaaaatgtaataaaaagagtaaggatctgtaacatggcccttcacctgaggggctggcctctccacagctgaaaccacacacttgccaccacctgctctgagcggacgtcccagagcgggagaagggggagaaagggagtgcggtgtccacgggggacactacaatgttcatttctctctgattacaaaaggaataaacattcactgcaaaaaagtaaaaggctttggaaacgtgtcacgtggaaagtgaaagttccccgtgactgggtggtgacgagagcagaggttctgtaccaaaggggagtcttacatcatgttcctctctttcgataatttttcttgaaatgatttgccaacctctcaacgtgtaaagcgtccctgattagaaagtctcccatgtccttggtgaataggataaactgtgtaaacacaacaccacacatgactcctttgtggggtgaggaacataatttgacatttgtaaatggaactctctggacgttaaccaagtgcttgggctaacttcttcaaagggcagaggagcagcaggtcactgacagatgaccagatgaacacctccccagccaccacgatggtaccttggagatccctgatatgataatagtgcttttcttccgtggcgacttgagtttcagctttgaagattcactgagctgtcgaatggccacttcagccactggatccgaaccattcaacaccaacaattctaccagaaggaaggcagtgttaagttcatcagcaaaaattaaagacttccatgggaacttccagggataatggaaatggtcgataagcaatggttagcagatattttctaaaaggggccaaagggtcaattgtttaggctttgttggtggtctctgcaacaacttctcaatgcagcttttatagagtgaaaccagctagagaccacaggtaaataaatgagcatggctgggtttcagtaaaactttatttacaaaaacaagtgacgggccagatttttcctatgggccatagtttgctgtttgctgacccctggtctacagcttgattccctgggtggttacaagatactcactgaagtgtctgcttaagattcaccgattttatttatttaagttatacctgaatagagttgatggaaaatggcaaaagcaagcaaacaacaaaaaaaaaatatctaaccctttggaagattttgaactttgaaaggcaaggtagtgactccttttccctcccaagagtgcctaaatacatagaatagtaactagagctatgaagggccagttaataaaagcacctccttccccaggttaataacaacacacaccagccaacatcaatagaatgcttacggcaaaccaggtgctgttcagagacagagctctgtgcacattctctcatttactcctattccacaccccatgagcaggtccttccttttatcccatttgaccattgaggagtatgtccagcagccaggaggccccagagctgagatgaccagcaggtctctctgactcagagctgatgcttgtaacttacactttcctgctcaggtaaagtcaaaatggcaaagctattaaagtagcaggatggtaaaaggaacttctgtctcggttttggccatggcctgaggcttacagatgctgcatttccaaagggagtcaagataagaccacagaggccaagaaccggtgacaacagtgacactggggaataataaatagatacttggtcttcctccctggttcctggcacagagaacaaaaaaaaaaatcctttgaattccagagccacggagctggggcatccttctcattcctaataagcccctgcaccccatccgagtgaatgctaatgaggacgggcactggatgtcagaggcaccaaccctgtggttagaaggctggaactttctgccctcctctcgcctgtggggaagggaaaggggctagagattgagctcaaatcaccaaaggccaataagtgaatcaatcatgcctacatacctacttatagaagcaccataaaccccctaaatgacagggctcagggagcgtccaggttgtgaaccaacgcatgcacgtactgggaaaggggcgactccacggagatcaaagctcccacactcaggaccctcccagactgtgccctgagccccttcatctggctgtgcatttgtgtgataataaactggtaaacccaagtaaagtgtttctctgagttctgtgagccattatagcaaattacggaacccgaggagtgtgtcatggaaaccccaatttgtagccaagtgggacaaaagtgtggtaacctggggacccactatttgcacctgacatctaaagtggaagggtggttttgtggggctgagcctttcacctgtgggatctgagctaactccaggtaatgccagaattgaattaaattgtaggacacccagttggtgtctgcagagaaacagaaaattgcttgccatagaaaatctacacatttggcgtcaggagtgttgtgagtagaggaacagatttttgtttagccactgacccacactgagaagagagaagtgctggagaaaggagttggggaggactccttaggagaaagctgtgctgtaattcccaaagccaccaagggagacgtgtcgggagcacgtcctcctcacgccaggcccagtgcttctgttcagtcccccgagagcccggtccaggtgccaggtgcagcctgcaccgtggcaggtgagcctgggggccggctccatggaccatgcatcagaacccacagtgggaacatcagcctaggtcttttaagagggatcctgcccacgtgacaggaccccgcagcatgggcagtgggggcactgccaggggaagaaactgaggaaggggcatcaggggcagcggcaaaagcatcagcggcattagtaccagagcggctccagctcaaataagggctgggcaaaatgaggctgggatcccctgggctgcactcccaggaggtgaggtgcccttactcacagggtgagctaggaggtcggcacaagacacaggtcacaaggaccctgctgataaaacaggatgtggtaaagaagccggccacaacctaccaaaaccaagacggcaatgagagtgacctctggctgtcctcactgccgatgatacactgaggataacgcattagcatgctaaaagacactcccaccagcaccatgacagtttgcaactgccatggcaaaggcaagaagttaccctacgtggtctgaaaaggggaggaatgctcagttctgagaaatcgccgcccctcgtagaaaactcgtgaataatccaccacttgtttaacatatgatcaagaaagaaccagaaaaagagccaaccagcagcccgtacgggttctctgcctacagagtagccattcttttattcctttactttcttaataacttgttttcaatttactctgtggactcgccccgaattctttcttgcaccagatccaagaaccctctcttggggtctagatcaagatccttttctggtaacgaaaggaggggcagggcctgcgtcccagaactgcaggtgggggacccagcggggtagtatccaaaaaaccataaaacctcccacaagaggaggaggcagttatgaactttcaccaggctgagaatccaacaccatgttaagacagtgcccctccagtgagaactttccactcccctgactgccccaccttgcccagttgttgacctgggcaaggtcagacacaggactcagcgaatgtgggagagctaagcaagaaggaagcatccattgcccctgagagcaggtcacgaggaggcaaagggagaaagttaatccccaaatttagattgcgcagtgatttaatgagtcagtaagacatctcttcaaaaagtctattacctgaaactgaccataaaatagggaatttgcatttcctattcgtagtgaccatttcctagtggaagggaaaactacttctactaagctggtgtaagcagaaagtggtgaataaaattaaagtgacggtgaggacgatgtcctgagtcctacttatttgctattaatgtagctagcgtgttgtgcaagagaaaaatgaacagaaaatttaaaatgtaaagtctcagttggctttttattttgttaaagcattccctaaaatgtagcaggaatatgaatgccgctcctggtctctgatcaatttggagttcccttttctccctctccttcactcatcactcattaacaaaacaaaagcaaatcaaaactttttttttttttttttttttttaagagacagggtctcgctctgtcacccaggttggagtgcagtggtgcaatctcggctcactgcaacctctgcctcccaggttcaagcgattctcctgcctaagcctcttgagtagctgggattactggcatgcgccaccacgcccagctaatttttgtatttttagtagagatggggttttgccatgttggccaggctggtctcaaattcctgacctcaagtgatccacccgcctcagcctcccaaagtgctgagattacgggtgtgagccaccacaccaggcccaaaacaactttttccaaattctgaaaggaaaatacttcatatcagaacagcccaaaaggcccaaaggtgctaagagggagagcgacgtgggcgtgtctcagttacctgtgtctgaagaagagagtgttttgctgacgggggcgctgcggcaggcgatggcctggacagagatgtccttctcgatcaccttcaccttgatgggagtcttcaccggagaatctgccagaggaagatcctgattacaaaagcggccccgtggctgactggatcaacagttaccgaaaagtgaaaggacagccctcactgcaactctggtgtgtgcagttggtaaaggcaaagcttaacgaaagctgttttgaggggaggaggggcaagagtggtgtctggagtccaggttgaaataaaatttcagaaacattttaactaagccagaatttcccattctattttgcatccctgaactgtgccaactcatgcactctgggaggataatgcttttgcccaagcagagatgcagtatgaattttgagaaataaagcatacgcttatacagaaacttctgtctccaaggcagtgcctgtggagacaggtacagaattcagctggatctcaaatgacagtccgtcaagccttctagcaaacgatttttcacagaagaaagtctacaaggaccactcactttgaatttttcaagaaaaaagcgtgtgctgtccccacatacaggtaatagagttcgtgttttgttttgttttgtttttgcttttttctttgaaatttgctcttgttgtccaggctgtagtgcaatggtgtgatctcagctcactgcaacctctgcctcctgggttcaagcaattctcctgcctcggcctccagagtggctaggactccacgcacgtgccaccacgcccagttaattttgtatttttagtagagatggggtttcaccacgttggtcaggctggtctcagactcctgacctcaggtgatctgcccgcctcggcttcccaaagtgctgggattacaggagtgagacactgcacccagccctatcattgagttcttaatttaacttagttggagttacacctaagggcaactatttacactatctagattttagcttcagaatataccatgggaattgaaccttgtttcagtttattgcatatgtgtttggcagaagagaaagataactgtcatccgataacaacaacaaactaagcacaagtgtggccaattagcacccttcctgtgctgtgagaatttcctaacactcggcgctgcaggctccagaactctgcagttgtgggggcaaggtggttacaggcaggcgtcatgcagaaagttcctcgactgcgttcctgttgtctcaccagagctcagcggggacgccctccccacgtcgacgcgaggcttggtcttcacagcagtgacagtagtgaccacagtcccacagggcatcaccgtgcggtccttttctatttttgcagcaggaacagggggagggatgggccaggatttcaattcaccaggttccatgtaagagaactgcagagaagacgcgttacttgtttctggttttgtggaagttgcccaggctgatcagccaggtaacactgccttcttgtgaaataaccataattcataattccttcccttaaggtcacttagcatctccaattaacctggatattcccagaatggacacagacccaaccttacgcacagccagctcaacacgtaatgatggcaacagaatagaagctggggaaccaagcaaaactttcaaaggcctttttggggtaggtccataaaatggcatcctgaacagttatctcctccagcagacaactcaattgtacagtggacagaacgtgctctattcgagtctggtcctgcgtacgatgaaacagcatctcctcttggaggaggtcttatttcacacagaggcaggagtgagactctgcagacataagtgaagacgctccttgggtaagtgccccaagccggaacccggccgcggcggacagcctcgccctacctctgccgtgaccgagcccagcaccgagctgccgcaggcagacccgctggtcagcgtgaagctctgtggcccagaaggctgcttcttaaataagtccagaggaactgtcgccgtcgccagcagacctgaaaagataggagacaggcaaggggtgccgctgatgtttcccgggcttccgtgaggacggaaaggcccacacgcccagcagccggaacacgctcctcccgtgcatccagcccacggggaagtgctcacgtttcagaatgtttgaaaaatgtcgatgccataaaagacaaagaaaggctgtggaaacgctgcaggacagaggatgctaaagcaataagacaggcaggcaatgtccggccctgtgccggagtggaaaggtcactgctctgaaggacatcacggggtcgtccagtgacaaaaactggaagatgggcataagctaaggaattgcagcaatgtaaattcagggagctgacaactgtaccgtggacacagcagagagtatctccattcctgggaaaatacacactaaagaattgaggataaagggccaagatgcatacaatttaccctcaagttgtgtgtgtgtgtgtgtgtaaaagaaaatgagtaaggggagggagagagagaccaagcatgagcacaaatagtagaggaaactgggcaaatgttaaggatacgtgagtttgagtaaaggttatgtggctgttctttgcattgtttttgtaaagttcgaaatttcatggattccatcaggctgggctggaacgaaatttgagtgaggccagaaggagtggggacccaggaatgggatcagaagttgacttctctccaggtaaacagcacccccatgctgtgcaggtccccgacctgcgttaggcttctctctcaggactcttatctcacgggcatcccagttttctcgggactccaaaatcaaggaagtcgcctcaggattcttgctaacaactaggatataaaactagttaactgggagaaataacaactttctcactttaggaggtaaccaaatggcttgattttattgctggataggctgggcaagggcttcccaattttggtatgtttatggggagagttttacaatctaagaaaatatttgtatctttaaaaacctaacaaatattgaaactactgatgtgtacacacacacacatacaggcccacgttcattttagtgttttagtgactttacctctaattgttgctttcttgtgtataaatcctgagttcaatgtaaacctctgtagtttattttacaaggaaaaacccagtgaaattcatacaggcagtagagtagggatgaaaaaagctctggagatagatgggggtgatggttgcacaaccgtgtgaatgtacttactgcccctgaactatgtacttagaaatggttaagacgatacattttatgttgtttatcttactacagttaaaaggttttgtttttgtttttgttttccaaaaaaaggaggtctcttggagctaagagggttcagaactacttctctatgccaagaattgttgcataaaagattttggatttttttaaaaaaacaaacaaaaaatccagttgaacatttccccaaaatgtatgaccttgttaataactcaaattgcctttcgaccaaacattcccatgggaaaaccaaagtcatttagaggaggggtcagcttcctctgctggatctcccaccgcccttttcctgaggccgaggtcatgcagcggaggacctttccagagggcgaggcctctgtcctcctgctcaacccaccttctgaggatcgcccagcctctgaaatctgcaggtgtaactccttcgacttggcattcaactcgctttggaagagaaacaagttatgagtcctaaaaaatgcaatgcttgattctttttatgaaatagagtgttttttctgattatagaaaggaagacaaagatgtcaatatttaacaaactaccaagacatataagcaaaaaaagggaaagagttatctgcaacctccccattcggaaacagttactgttaatattcggtgactagccttccagagtagtcaacaggatgttctgtgatggcagtgacagagaagctgtcaaatgcggtaggcacggagcactggagaggtggccagtgcaagctgaggaactgaacgtcattttaaaaaatttccattaatttaatttaaagagacacatgtggccagtcgctgccatattgaaagcacagctatataatgacctaaagacaaaatacggaacatgatatacctccctcctccttcgtaacctatttattttcattacaaaggcattaaaaaaaaaaaaaaaagtagagatgaagtcttgctacgttgcccaggctggtgtcgaactcctgagctcaagccatcctcccacctcggccccccaacgtgctgggattacaggtgtgagccgccgcgcccagcctgtaacctattcttttaactgaaaattttgtggatgtctttctgtataactacagagcaacatcatgttggatgggcctctagtattctgctctttgcccttaggagattttatttagccaactctttactaaacaacccttcttaatgtgttggtggtccccactatttcataactatacacaagctgagaggcacattcttacccatatatctttgcacgccgtgtgattatttccttaggaaaactctaattgcctgtcaaatggcatgtgcatttgagaggtgtttttcatttaggtcgacggatggcatccagaatgcttattcccagtgacacctccaatgccattatcactctcttattctttaccaagctgtgaggtggaaagatgacctctcccttttgctgaagtttgcatgactttacttatttctgaacatcttttcagaagtttatggccattggtagctctggcttttgtatttccagttcaggaattttgttcagttttctaaggcagctgtcatcttttcattcatgatttataaaagctatacacacacacacacacgggaaattttcttccattactttttctaattgttcattttttaaggattagattatgattaattttaatactttggtactcagctaattcattaaatgattatgtctattagtttttaaaatattcatttctaccttatatcaattattctttctaatagcttgggttgattttcttgcatagtcctgatacgcagtcatatcatctccaagcaatgattggtcttgcctcttcctttccggtatttgtgtatagttttttcccttatctaatttgcattaaccaatacttctagaataaaataggcatccttctcttgattttagtgagtctgcttctggtatttaccatttatagtgatttttaaaatcttattaaagaagtatccataaattttgctctaattaagtttttaaaaattaagaatgggtattaaatgtcactgaatgtcttttggacatatgtagagaaaatacatttattttctcttttgatctagtaatacaatgaacaccattaacagatttccttatgagaaagcacacatacatccttacattcctggtatgaacacagctggttttatttttcatgtgctgctagattctgtttgataatattttatttatgattcttaccccattatttatgcatggcctacatttttccctatctcgattctttttttttttttttttttgagatggagtctcactttgttgcccaggctggagtgtgcagtggtacaatctcagctcactgcaacctctgaatcccaggatcaagtgattctcctgcctcggcttcctgagtagctgtgattacaggcacctgccaccatgtctggctaatttttgtacttttagtagagacagggtttcatttaccatgttggccaggttggtctcgaactcctgacctctacccacctcagcctcccaaagtactgggattacatgtgtgagctactgttcccagactttctttctttttttttttttgagacagggtatctctctgtcacccaggctggaatacagtggcacaatcacagctcactgaagcctcgctctcccagactcaagcaatcctcctgcgtcagcctcccaaatagctaggagtactacaggcaaggcaagggccaccatgcccggttaaattttttaaaacttttagtagagaagaggtctcgctatgttgctcaggctggtcttaaactcctgggctcaagcgattctcccgtctctgccacccaaacagctgggattacaggcatgagcctctgcacccagcgcctttttctattttcttcgttaggttctggattcagtcagaggctccctcccttttcaccctggatgatatgtgtgtctgtaagagaccccacgatggctccctctcatcatatcagggcaggaggagaaaactgactctaagagctgcctttacaacaaaacccatgtttgacctaaagctacctttaagatgcttaagacatcatttgttgttaactgttttggtttagtgttttagcctaaacggtgctgcagaatgatttcaggatttggcgctcctgaacagacacggccgtggacacacaggcccataacccggccagactcacaaggtgaattcctcttcccacatgaggtccggagtgtttttcgtcagggtgctggagaacctctgaacaggatcgttcagctgcacgacgcacactgcattaatgtggcctgtaattaaatagaagggcatcgtgttggcgtttatttttattatttatttatttttttttttttttgagacagagtctcgctctgtcgcccaggctggagtgcagtggcgcaatctcggctcactgcaacctccgcctcccaggttcaagcgattctcctgcctcagcttcccgagtatctgggattacaggcgcacgcctccacgctcagctaatttttgtatatttagtagagacggggtttcaccatgttggccaggctggtctcgaactcctgacctcgtgatccacccgcctcggcctcccaaagtgctgggattacaggcatgagctaccgcgcccagcattatttttattttttaaattgcatgaagacattgtatgcatagaaaaaaaaggctaaattaaatgactaaggtcgaggtttacccacttcagagagtgggaattcttgcatctgccattttcaaatgctcatagcaccagcctttattggagttaagtaattttttcccacatttgatatcaacagccaagggctgttgaccccaagtacctcgccccctccgtcagtgctggccacaagcgtgggctcccagggggaccctccccgagaggcagcaccattatatacacaggcatggtccccacttttagacaagactaacagtttgccaaagcctaaacatcagttcgtgttgactcctaaatttggaaatatacctcacagagttcccatttcccgacttacaccagacaggtgctgtacctgatactagccagggtatttgatccaggtagtaggacatgtcactagtgaacagctgtttctgctttgagacaatgcttctccctgcagcacaaagtccccaatacactgtggaatcagtaattgctggaatgtgtggacgctggaccacgcagcagcagggtgaagcagcctccacgcattcgctactgagctttcacagtcactcttcaagagaagactcagacccagacgtggggacatccagcagaggcaggaacggggcctggcctcaggacaggtacatgtgagagctgggaccccaaccctgaccgaccgagtccagggagctcacgtttagccactaagcagtacaggctgaaagggcaacatgtgggcacttttaccaaaaaacatcctcaacagctagctctgcacagtctcagttgctagatgtggcccatttgtgcttttggaactggaggaagccccttgcaaataaagataagtcacctttaacatactcgggcaatacaatttgctcctgttcttggcaaaatggagtcgcgctgtaaagaggtgccctgtcccgagtgactctgtgtctggggcctcaacagtgattcagaaccacccagaaggggttatccattctgtgttgcttgtcttggctccaacagcagccatggtctcccagcatcggagtcccgagtgtggccgaagccatctgatgcccatcaactccctacatcccccttcacccactttctaagaaagcagaatctccagcactttgggaggctgaggcgggcggatcacctgaggtagggagttcaagaccagcctgaccaacatggagaaaccctgtctgtactaaaaatacaaaatagccaggcgtggtggtgcacgcctgtaatcccagctactagggaggctgaggcaggagaatcgcttgaacccaggaggtggaggttgtagtgagccgagatcgtgccattgcacttcagcctgggcaacaagagcgaaactccatctcaaaaaaaagaaagcagaagctgcaccttggtcaaggatgcttaacacatacatacaggttcaacagttaaaaaaaaaaaaaaaaaggaaagaaaagataaaaaaggcaggacaattccagacaaatgaaaaaggccaaaccaattatactcctttccctccttggccttcccacgtgcagaaacaggattggattttttaccatctcttgttcccgttacattttcaggtgctttctgcaaccgtggcagggctcccgctgcacccccacgggaggatgccaccagagaatccaaggccccccggagcccccgactctgctcaggggctggaagagcccctccaggcaggcaggctcccatcgtcacccacctgaggcaccgggctcgctgagcagcaagacgtggatgttcctcaccagtagcttcagctcgtgagcccttggaggtttaggaggacaggattcctgagcagtagatgcagcacactgtaagttctgaaaaaataaagagcactttatttttggtcttcatggggagattgagggccaaggaagtagccactggactcctgttatggggggtggtggcagtggggtgtctacaggaaaacctgcacagggagcccgagctctgggatctgctctgaaacaatttcccttctcacatgaagggagggagccaatgagccatcgccatcctcctgcctgggagcattttctaccccaaatacagcaagtacaagtagcagtgcattcatccacagacagggttcccacaacttacttaccacgggggaagatggagctcactttgccatgggtctaaactatctgacccgggcaggtgcttaagagcatgaggacctcttccgctggctgcgggcactcatggcctgctagtacagagcaggacaccagacagatgggaacagccagggctgtcagcccacacccatttcccacctccacacagagtccaacgtccacatgaggaaagtctatgcataccctagcactgcacaggtgaggggacagaggcaggggcagctgggaccagcttctaccacatcacatcctccaatagacaccacatcacatcctccaacagacaccagggcgtttccaacagaaagcacccccaaatctggaagagcccagcttcaaaccagcatttcccaaaccgggttccacctgtcactcactgccaagagtgttcttttttttttttgagacagagtctcgctctgttgtccgggctagagtgcagtggtgcgatctcagttcactgcaacctctgcctcctgggtgcaagcgattctcctgcctgagcctcctgagtagctgggattacaggtgcccgccaccacacccggctaattctttttgtatttttagtagagacagggtttcaccatgttggccaggctggtctcgaaatctccacttcaggtgatccgcacgcctcagcctcccaaagtgctgggattacaggcatgagccaccacgcctggccaagagtgttcttttattttatttattttgttcgtttgtttgttttaagttctttttctttccttttctaattatactttaagttttagggtacatgtgcacaacgtgcgggttaaagaggctctgttcgttgcaagcattcagggacccagacgggcttctcggaggtggcgccagcccccatgctgtgagaagttttcaggcagagctgaaaactgggtgctgatttgactgagcactgatttgactgagcacttcttcgggggaatgctcactaatgtctcaagagacacaggtgttctttcccacctagaaaacactgttctgagccaggcacttcccaaacgtgagctgagggtgctggagcccaagaaggaattgccgaaatccctgaaatccaaggacatgagcactggggacagagcaatctacttgtctgggacagagatgaaatcttttttttcaattgctgagggtgatggttaactgtatgtgtcgacttgactgggccatggggtgcccagatatctggtccaacatgattctgggtgtgactgactgtgtttctggatgagattaacattgaacttggcacacccaatgatgcagattttcctccctctcgtgggtgggcctcatccagtccgttggaggcgcaatggaacagaaaggctgagtaaaaggaaactccttcactgcttgagccgggaaaggggccttttcctgccttcagacttggactgaaacagtgactcttcatgggtcttgagcccagtggcctttggactggaatgtacgtcacgggctcttttaggtctcagggcttcagactcgaactagaattaccccacagactctcccggggctgcagcttaccaaatgcagatctcaggacgtaccagccttcataactgtgtgagctgattacacacacacacacacacacacacacacacacacacacacactcccattggttctgtttctctggaaaatcctgaccaatataatatacatatatgctattttgattaaataaactgtacaaatttatggaaaagcatgattgaagttatgatcgtctgggtcctattaaattcatggattccaaaaatatacgactgttttatgaagccgcatacattttgacattaaaagttgattgtcacattcagaacagtcacctctgatgtgaaataagctactgtgacagaaatactgaaagggacagcgctgggactctcctctcacctcccaagaggcatggcctggtcccctccatttggagaggctgagtgcccccaggcctcaggcccctgggaagccccccagacatccacacccctcctgctctgctctgctggcccggtgccccttctgcatactgcaggcttcgggagggtgatggtgcttccttatactcttgtgacccccatagccagggcttagcagcaaacactgccatcaactgatatctgtccagtgaaacaaagtcttcagactctacctactgacagctggtgacatctgcagaccaaggacagacatcacacaggaatttgtattttcaaactgacttcaccaagagctagataataaagatggacattataataaagatgtattttatcatgctacataaaaccactgccaaaaaaatatattttttaaacttcagggactataagtgcctgttgtacgtaatcatgataaaaagatcagcgtatgactgagagaactcaccttaaacaaaggattactgatgtgttatttaggcccatgaggttgaccagggcaaatgctctggttaagaatttaaccagaaaagtgagtagcgccctaatcagatggaataggggggctccagcatgaggagggaggcaggtgatatggaaaagggggtcgcacagatgagactagcctcctttatcgtgtgcctccaaaggacacagacctccaagaggcaggagctgttgcaggcaggaccagggcagcaggccggccctagcccaggctaaaccatctctgtctatcccacccacctggctctgcttgcttctggggcaatgttctcaacactggctgctttcccaggtaccttggtcctggaaagatgaggtctagggctctgaatggacagggaaatgtcaggttttccttccacttcatgaagctttgcagccccatgctccaaacccaaggctttatcccacatccaccatcatgatctccagcaagcacccgagccatcttggctctaccatgggaggtggaggaacgctggaacgcacacagattctccaagagaggtgggccatggtgcctaacggggttcagatgcacccacagcacccagatgagtttacctgagcttcctttacagtcgtgggcttggtaatcagaaccactgatggagaggcagaaccagccaaatgcttcaagatgtccttgagaacgtcagacatcgcacttgtctcagccacctggtcctggtgaaagaggagaaagttgacaaatcgcctttgcaagcccactccctgctcccaatctcacgtcttcaggtgactaaaaccatgcaaagtaggaaggaaggaaattaccttcagattttagctctgtctttgcaaaaactgtggaaagaaaggacgccctgcccttggaagcagccttcggactcagcccaagttacgagtgcagcaccctcaccgtgggagagagggcctgatcgtcagacatggtggagcgtcaagcaggtacctacggtgtcattagccttggctgcatatgagtgctaaaatcatccccagccaattaaacctgcatcttgggtggggcagggaaggcttcagggttttttttttaaatggccaggtgactgcaggtgcagctcaggtgggagccctgcatccaatccatcaaagccatcccccagcaggccctgccaagccaaagggcccatccacatcctgagaggcccaagccagccccaggaggagtggctgggacagggaaggaggccagcaacaccagccatgcactcagttccccaccgcagactgtcctaacacacgtgcgttctcacgccaatggaagaatcataaaaacttacggactgacctcccccagtgctttgggctggatattaacggccatttccggcacactgatgaaagaccagctaatctggaggtcctctctcttctccttcatgtggaactccagctattaaaaaacaagttattagagggccactctttccaccaaagccttaatgtgcacgtgcgtgtgcatgtgactgtgtgagcatgtgtgtgtgcatatatgcatgtgagcatgtgtctatgtgagcatatatgagtgcatgtgagtgtgcgtgtatgcgcatgtgtgcatatgagcatgtgtgctcatgtgtgcatgtatgagcatgtgtgtgcatgtgagtgtgaatgtgtgcatgtgcatgtgtatttgagcgtgtgcggaagtgtgcatgtgagcacgtgtgcctgtgtgtatgtgtgcgcatgtctgcatcagtgtgcatgtgtgtatgtatgtgtgtacctgctcatttattcacatattttcacagaaaactgcttagctttccacttggcatacaatgtgctttcaaaatggagagcaggaccccaaactctctttaccccctgcccttcctgccccttctctggcctcaacctacccctcaaagaggaacctcagcattggtggtcgacaaccagatgccatcaaaccttgcagtctatttaacataaatagtttgctgtgctttgcatttctccttctgggagtatccgcaaggcataaaggaaagaggagtgagagaagggcccagggcgcctcattctaatcctgggcgtgggctcccctgccccacactcaaacagccctgaagattgtgtgcagcacaaagccatctttactgtctcttgctggggccgccacagcagcctctaactggactccatctctaaggatgcctcatcccaccctgtccatttgggagacagaacagcggcccccaaagatgttcaccccctaatccctggaacttgtgactgtgagaccctacagggcacaggagacttggcaggtgcgacagggagaggacctcaagatggggagatgaccctgggtccttccgaagagcccagtggaaacacctgagtcctgaagagtgggggagcacgggagaagaggggccagggcatgtgacgtgaggactgcaggcatccctgcgggtgtggacgtggaggaaggcaccctgagccaaaaaatggggtgcctcaaggagccggaaatggccctccactgacagccacaagaaaatggaactcagtcccgtaatcccatggaatgaaattctaccaacaaccccaaaagcaacgaacagactcccctgtgactgccgctaaggcaggcagccctgacagctcctggatttgggcctggccggacacctggcctccttcacgatggcatcaccaatctgtgctgttttaaactgttcagggtcatttgtttccacagccatagaaagctaatattgcatcctttattcttcagctagatgctccgtccaaagcaaaaatcttaactttgcagatctccattccttccccactcctaaacaaaagggaagaacgacttcagactatctgagtaagtggactctcacctcatgctagaagcagggtaagagaaaaacgatgacttctacttcataactgtctccaacctgccttccttgtctggtaattctaggaaaaaaattaggtaattctagtggaaaagtgcactttaattgttttgacacagacagctcagtcgatggagaccactcttgcatctctggttggaggaacatcagagaagcgggaacgcctcctgccgctagcatcaattatttacccatctctagcagctgcctctgcgctgagaggtaatccacatattggttcctaactgtgttaacagatcaaagatacaattgtgttccttctgtgtgagctgcttaaaatggcatgaatgctttgatataataaacacaatgtcagaaatgacatttcttcatttgtgtttgtgatcctctctggtctcattcagttccaaaacatgcatcaaatgttgggtaaatatgacccagactttgcaggttattttctcatcacattgtccaaaacatctgggggatgtaggagagcatgaacgcctcacaaatccacgatgccaactcttcacctcttcaattccctcaaagggggtgctgctggagtggggctgaggaactagcggggtggatttcagaaaaaagccacttaggtagccaggaaatcttgttagtgctggctatttaaaaccatgcctttgtaggaaaagcatacaggatgtcaccttcccttgtgattgggaattctgcatgacttgagctcatcccccaaattaggagtcaagtccaaggacacgggacacgggagatgaaacagggcattgaactggcagtgaccctcgaaacaagcccagacatctgcaatttttaaataccagctaaagaggaactccagtgaatatctggccggatgtgagagacgcacagctctctgatgatttgggcaaccaaagtctcactgggcttattgtaattattagagatccgtaagtctctctctataaaattatagagatgtgtaaaattatatatatgtctttattcttatgtctattatgaaaacatggaataatggtaatactaattttttaacttataaaaataataagggggttctttttaaatcaactttgtcaaaaactgaaaagaggaatgccccacggcagccactcagctgtgtttccaagctgcaaccagcgctggattcggaaccagaactacttttctcctctcagatgccacctgccttatcatatccgtcaacaacaccctgcctcattcaaatgcccgaaagaggcaacccctgagtttattataaatgtatgtgtgtgtgtgtagtgtgtgtgtgtaatgtgtagtgtgtgtgatcatttcctacatagaaaatcctatatgaaaggttacagtttgaaaattatgacatgaatgataattaataaaaacatgaacgttacagccctctgactcacaccatgctcactcttcacatttctgagaactgtgacgggtctcataacttgcaaagtctacacatctttacctgtaaatggaaaggggagagccgcatgtcgtacagccggcatccagcacccaaggcaggcgtctcgctgaccaagaactgaatagcctggcccaccacgtgacagaccaccacctggaggaggcacaggtaagggagaaaactgtatccaaaacaaaggacagcgcgtgcatacgcatcttcttcttcttctttttttttttttgagacaaggtctcactctgtcgcccaggctggagtgcagtggcgcgatctcagctcactgcaacctccacctccccagctcaggcgatcttcccacctcagcctcctgagtacatgaaactacaggggtgtgcccccacacccacctaatttttgtttttgtcttttttgtaaagatgggctctacctgtattactgaggctggttttgaactcctgagctcaaacaatcttcccaccttggcctcccaaagtgctgggattgcaggcatgagccactgtgctcagctgccataggcatcttttttttttttttttgagacggagtctcactctgtcacccaggctgaagtgcagtggagcaatctcggctcactgcaacctccgcctccctggttcaagtgattctcccacctcagcctcccaagtagctgggattacaggtgtgtgccaccatggccagcaaatttttgtatttttagtagagacaaagtttcaccatgttggccaggccagtctcgaactcctggcctcagctgatctacccacctcagcctcccaaagtgctgggattacaggtgtgagccaccacgcctggcctaggcatctttatatcaaaataatctggactttatatgttagcaaggatacaaatttagagtttcaaagttggataaatattcagattaaaaccttttctataatatagtttgaaaaccagaaacaatgtttcaaatctttgcttcctgatgactttcttagcagctaaagtcttgaccaaatctagttatcatgcgctttccacatgtaatacagtctttttcctttttttttttttggagatggagtttcactctgtcgcccaggttggagtgcagtggcacaatcttagctcactgcaacctccgcctcccgggttcacacgattctcctgcctcaaactcccgagtggctgggtttacaggcgtgtgctactactcccggctaattttttgtgtttttagtagagacggggtttcaccattagccaggagggtctcgatctcctcacctcgtgatccgcccacctcggccttccaaagtgctaggattacaggcatgagccaccgtgcccggccaacaaagtctttttctttaaatatcatcttgttctatttctccacaatagctgatttttaattccccaaatgtttccacattcatacacagtcaaagccattagccaagttcttttgctaaaaatgagtcttaaagagaaagtaagttatagatgttagaagtaaaaaaagttttcttaaattacccagaacacaatgggttgcttccacctaaataatttcgaggcgatcatggttttcaaaaaggtgggagtaattggaaaaacatacaaagtatcaaacaattataaaattatgcagccgtaccaaaaccagaattataaaatgagctcgttgaagaaactgtcagacagagaaagataataacctcaggaataaaccaaactgtggtttcctgacataaatcataatcatacagtattaagaggggtgcttttcacagctaccatggcacagagagagatctagtttctgccacagattcctctacagaagctgatgtagaatgagaggtcagacccctccccgctcccctcccgggggcagagggccaagcagacacgtgtgggataattaccaggccaggtgccaggtgtgtactggccaggaggaggagaggggaggccaggggcacagtgggctggaccacagggcaggcacaagggggttccgtaggtggccagtgtttggccaaaaagcaaagctaccaggagctgagggtaagtcagactgacctcctcattcccaaaagaaccactgactccactgcagggagtcacaggacaggaagagaaaattctttaattctctggtggatttatcagaatctaaaataccaaatggaaagattatcaaaataattactcagtcagggcctgctattcccccaagttcagggctaggacattcccctgtactttctcatctgctggctcctggccgcagccaagccctgggtccagctcttcccaccagtggcccatcccactctggaacaaaaacggaacctgggcactaaggcccgggcaggggtcaacatccaatatccacaaccaaatacctcaatgccacagagctagaaaaagaaaatcctgccttctctcaatattggcagaaagtcgtgcaactctttctaccggttcttataacgccacgttcagaagactgatacacatgagttaattacatatttccatcatctccagagttcacaaagggccagaacaaaaaaatgtttgtataagaaatgttgtctattcatgttaaaaataaatgatctataaacagtcctttacggaggaacatgctttgtggccagatgagttacacgcaccaatggcatgacactgagaaaattccctgtccttggtctcaacagcccactccttttactgcttaaagtaaaaaataaaaaataaaaataaatttaaaaacccaaccctgactctgagcactgcataattcctctggagccttctctactaagctaatcagcattgtaccaagaaaacagactcagagcctcaacccgagcaagaaagaatttcattttctttcgtatccagttctgcagaaagcttcccaccacgcactccctgatacacagagaaccaagcacttgattaaaagcaagcaaataaataagtaaatagataaaaagactttaaaacttctagaatgcgggactccaaagctcataagtaatcactgaagccccatcactaaggtaatgtaatctctacattctactctaggacagaatgtgtgatgtcttttcatagtaaccccctggcgtgtcttccccaaccctagggcttcgctaccctctaaataaaacctacagtgcagaccaagcctttcttagcctcccctcagaatttggctagaaaagttaattaaagaaacaatttaggccgagtgtggtggctcacgcctgtaatcccagtgctttgggaggctgaggcaggaggactgcttgagtccaggagttcaagactagcctgggcaacatagcaagactccatctcttaaaaaaaaaaaaattagccaagcatggtggtgtgcacctgtagtcccagctactcagaagggtaaagtgagaggatcacttgagcccaagggtttgaggctgcagtgagccgtgattgtgccactgcgttccagcagaaagaaacattctgaacctgcctcaaatttttacatggccaaacaaaatactgctcctgctccacttggagggataaacattagggccaagtcctcttccagcgccagcccctgcctctgccaccctaacaaataatgccccatttgccaaatggacggggacaaaatggagaggagattttaaaaacaagtaatcttcttttagtgtattaaggtgttatccacaatggggattaaattctcccaacccatgccaacagtggcagggcccccacgggctgaaaggggttcctcgcatcacagcagaagtcaggatcgcctgacacaggtaagcagctcctcctctctagttagccttcctaagtggccagatgtcaagggttaacatctacctaaatacccacgagtgggtagagaccctgattttgaccctagatcctccctcccacaatcagccatggtcatgagagcctcttcttagctttccaagtgagctcttcggggaattccagttctattcaattgacagactgggccctgagtgtttccctctgaaacagtctgctattaatacaggattttaaaaagttaaatagaagcaattatttggcataggcggcagtgacagtgaactcctcagaggacaggagtgaacccccagccccagggaagaactccacagagcccaggtctgcatctgcaggagcgagctccctcgacaacaaccaaccatcccccaacctgcatttttttgacattttttttccccaaaacaagcaaagattatttacataaagcatttgaaaatcaagcaacagaagggtgaactttgtattccaaataaacagcttcctctctgtataagtgacagagtgtttttcggagtggggggctattcacggtaagtcagggtctccacatggaaaggccaaggggggactcacggttggcaggtgagggtttgggtcggggagccctgggcagcagatggaagcaccacggggaggggaaaacaagactgaaggctgaagagcaggctgagcggggaggccttcattcaccttctcggtgctctctccagcctcaacaccttgacctcatgtagtcacatacctatgcaaacagcgcttatctggaaactattcctttgtttagacttggggccaaaaaattccaggcacagttactccagattttgctactgttcaccaacaagagagcccctgagtcttcagatctcactgtgccctttcactttccttttcaattaagcttcctgtacagctgcctcggctccttctcttagaacactctagagaactggaaatcatgtaattacttttgtctccaaagaaactagcaatgcagctgaggaaatgtatacaaaaggtttagatactcgaataattttcactttcatcacattctgtaacacccaaggaaagaactcccaaataaaaggaaggcaaagacccttcagtaatcatctggatttcctagtcagatgtctttccccactctgcaagcgagtctcacctctgtaaatatcctttaagacagtatgaactggatataaaatactatttctactctggaactgggactcaatttaaaaagtaaactccattagagctaaagattatcccaacatctacaacatttaatcctgtttgcccactaattcaaaataaacggctaaagatgtatttttatttatttatttttgagatggagtctcactctgtcccctaagctgaagtgcagtggcacaatcttggctcactgcagcctccgcctcctgggtttaagcaattctcctgccttagcctcctaagtagctgggaatacgagtgtgcagcaccatgcccagctaatttctgtatttttagtagagacagggtttcaccatgttggccaggctggtctcaaactcctgacctgagcctgcctcaggctctcaaagtgctgggattacaggcgggaaccaccgcaccgggcttaaaactgtatttatttattttttgttttttgagacagagtctcactctgttgcccaggctggagtgtggtggcaggatctcggctcaccaaaacctctgcttcctggattcaagcgattctcctgcctcagcctcccgagtagttgggactacaggcacgtgccaccacacctggctaacttttgtatttttagtagagacggggtttcactatgttggccaggctggtcccgaactcctgacctcatgatccacccaccttggcctcccaatttgctgggattataggtgtgagccactgtgcccggccaaagatgtatttttataagaaattctcgcaggggattgagatgaaaagggttggaaacaagatggtggccaaccccaagagctgctgtttatcctcttttgggggaagcctccaccacgtggggctcctgcgtcaacctgactccaaccccgcccccagcaacactctcctcccttttcttgttacatactttaaacaagaaagcctttcagtaatgctgcactgcaaggaggtgttgttaatgcatcacacggtttaatgtggccattctacacagaaagatctgtttgtgaatgtgttgtctttcatcaagtttacactaaaagacaaaatcaagacagttcctttaacatgaagagcagaagggaagtaggtcttctccaggctggcagctagtgcttcctgacagggccaggccacttggccacaccaacctcctacgccccatgctctgtattccgaccaaccgacgaaacctcggggccaccacaggtctttcactctgtttcctccaggccaaagtcgggctgcacctgcaggctggctcggcccagaattccatacaccatcatccagacgaacaggtggcctcgtgggagtcgcattcaggggcagtatctgccctggatctcagaggacggggtctccaatgaggaacctccaccacccgccctaggaaagaccctcattcaaaacaatttcacaacctgttagcattttagcataaattccaggttaatggaatacctggaatttcaaatcatgtaaagcaaagcaaaaaaaaaaaaaaaaaaaaaaaagacaactgagccgagcttcctgtttacagttagctagagtgacaaatgtggacaattttaaatcatggtgcccataccaaacaggcagccccctgagttatggacagagcaggggaccgccccccaccccccaatcccgcagctctcagggcgtatttcagcatcaggtagaacacacgtgcacacaacacaccacacacacccagggcgagttatgggtttcccctagagaggatatggaataaggttctgggggaaattccacacgatcgtccagttccgtctgtagctgtggttttacagatgcaaagcgtgatagtgctgaccagttctcctttccctatctctgttgtcttttttatggtgaggatgtggtgggggcacgagcttaagtgaaataataaaagtgataatatcatacctgtaatctcagcactttgggaggccaaggcaagaggatcacttgagtccatgagtttaaaatgagcctgggcaatatagtgagatcccacctctaaaaaatatttaaaaagtaaaaaaaaaaaaaagtaataaaaatgcaaaaagatcacactaatggcatggtttattttgtgctgtggttggagctagattctggaggccaaatgaggttcactctggcctctgctgcgtcagagctccataccttggccaagtgactgcacctctctgcctcagtttctccttctgtacagtgggatgatgcttctgacacaggagcatggtgagctctcatgagaagggatacaagctctatacccagggcctgggcacacctgatgccatcacatgccacaacgtgtgccatgcggggtactgcacgggcacaggcctgccctgcttcccacagccctgcacgggaggggcccctacacaacagacacagaccctgtggctcagagaaagaaggaagtgccctaaacgagcccagatccaatcagggtctccctggcttctgagatgggcctttccccagactaggtgggttataacttttatttaaaactttcagttccagctgatggttataccattgggagcctccatttacttagaaatgaaactgaaaacagacaactaaagcatgtccaggactcctggctccacaccatgccaggcgacatcactcaagtctccaaagatcaccaagtgtccagctcagctcctgccctcatcagcaagttttccaaatgaaagttacgttgaaagccacagttaccatactgtaaccagaattcaggcagtggctgctagcagagtatgatgaacaagagcaggtctggtataaagacagtgactttgcattccaaagcttagcttaggggaagaacaggcttctgccttaagggtacccctttgcttttggggcagaaagcaggcactttcaaaagggggcttggcatgaatgtcatgaaagggaggaagcgagcaggtgagggttcacctaacttgctttggcgccttatctattgagtgtccaagctggtgaccagtggtgccttagtggacaggactagattgtaacagccgaaactcttccggtgggagagagtttcatcatgggcacactctgggttataaatcgactgttctctctccaggcaacctcctggtgggtgagggtttcattctggagcacctgagcacatggttaggtaagctttcccggtaggcagtttctggtgaaagggaggtaagaggctataattgcatttctgaagggctaagtaaaaagtggggagcagggggaagtggagaaagaaaagagaaaaaaataataataaaccaacaataactcatactctttttcttagaaaatgggggtattcagggccaggcacagtagctcacacctgttatcctagcactttgggaagccgaggtgggcggatcaagaggtcaggagatcgagaccatcctggctaacatggtgaaactccatctctactaaaaatacaacaaattagccgggcgtggtgacacgtgcctgtagtcccagctactcaggaggctgaggcaggagagtcacttgaacccggcaggcggaggttgcagtaagccaagattgcgccactgcactccagcctgggcaagagagtgagattctgtctcaaaacaaaacaaaaaaaaaaagaaagaaagaaagaaaatgagggtattcggttacaatatttcctaaaagaaatgcaactctttttcagtgagtgacctgtcacagcacagttcctaagccctgattcacattcatctttttactgatgtgtggacctcagacccccagggaaggggtcatgaaaagcttctgaacccccacgtgccagggaagggctgtggctgaacctgcgggggaagggctggctctcaggtggcttgagatatggaaataggaatttcctccttctaggtcaaacattctggagcaaacctctcccaagacatgaggaaagacaacataggtagaaacttgttactcttgtgtaagaaggtaattgaagtctaggagaaataaatgcactcggtgcatgttgggactagaagagaatgcagagagagccccggagaaaagtttaaaggccatgctctgctgcctccaagccagccctcactggagcctgctcacagcagccgtgggcaggagcgtgcttccacacccggtctgagcagataccctgcaaggcaggcacccaggagaattcccttaggaaaatgccacagccctgcagggcctgctgcctgtgataaatatgtgtttggtctttgttcctgatgcctggcacaaagctctgaaaacccttggaatctcccgagagataagagcgtcttttgagaagagtgtctttttttttttttttgagacggagtcttgctctgtcgccaggctggagtgcagtggcgcaatctcggctcactgcaacctctgcttcccagattcaagcaattcccctgcctcagcctcccaagcagctgggactacaggcgcgtgccaccacgcccagctaattttttgtatgttagtagagacggggtttcaccatgttggccaggatggtcttgatcccctgacctcgtgatccacctgcctcagcctcccaaagtgctgggattacaagcgtgagccaccatgcctggccaagtgtcttttatatgctgacaaaagggctgttgggggggaccccagatagcaccaggatgggggctggtcacttgagaaactttgagccccacctccagcatcccactaccccacctccaacatcccaccactccacctccaacatcccaccaccccacctccagcatcccaccaccccacctccagcatcccaccaccccacctccagcatcccaccaccccacctccagcatcccaccaccccacctccagcatcccacctccccacctccagcatcccacctccccacctccagcatcccaccaccccacctcaagcatcccaccaccccacctccagcatcccaccactccacctccagggagggcagaggggctagaggtcgcattcaatcacctatggccaatgatgtaatccatcatgcctagcgaatgaatcctccataaaaaccctgaaaggatgggtttggggagcttccaaggtggtgaatacatcaaggtgccgggcgggtggctcgtccaggcagggcatgaagctgctggagtccctgccctccccctccgcccgcctaagcatcccttcgatgtggccgatcctgagtcatatccttcacaataaactagtaatagttagtaaactgttttcctgagttctgtgctatgagccgctctagtaaaatatgtgaacctcagtggggtgggttggggaagtctgccatctacagatagtcagaagaacgggggcaacccggagcttacgcctggtgtctgaagtgggggccgtcttgcgggacctagccctgggcctttgggatctgtgttaagtctgagtaatgtcagaatggagttgaactgtaggacacccagttggcaccagagttgaagaactgataatcggtgtgagaaaaacccccacacatttggtgtccaaagtgttgtgagtaaacatagttgagactgctcctggccgcagccgcggctgggccgggtgtggactctgcacttatctatcgttggtcctgtgggatgactcaagctgctccaagttctggaagaccgcactctgtgtagactatgcagagagggttttgcagatgaaccagatatttgcaaaggtgatgacttggacacaccgaggccttcagggtggcaggagaaagtccaagaaaaaggcatccagtgggcacggcagccagtttcattgggagagggacccacagggagactccagatggaacaccagtcaggggtttgtcggcggagaggaggtggggagctcaggccagccagtcctcggccttatccttccgatcagagatggcattacataacagacaggctgggttccggcggccttgtccctgtcttggctcaaatgccaaccacatgtcccttgtcaaggctgagttagaaagataggaagaggcaacctgacaccaaagtgtgagctttgaaagggaggggcgatgccctggaatgagaagttcctgtttcttttctacctcttatttgtcacaggtcctcaagttctgttacagtttttttttttccttctcaagaattatgcccagctgagggaacacgaggcggtgcagacacggaattaggtgtaaatttggagaccatgggggtgtgtggcttagataccagagaagaggaacaccactgtgaacccgctgccctacacggcagttctagggctgaactcaccgaacagtgttaacaaaaagaggccttgctgtcttatcatttttatttaacgcacgaacattaagcagtgtctcaccctggacattttacaagagattaagctggctggatgcctttgcaaaaacagtgccctaaaaatgtgtcatgtttggccaagatgctcatccaagaatggaaaaggccatgtacacaatccaagcacccgagggtgttctactcccaactgacccttcccaggagcccgggcagatcccaacaggacttcctccttgtgggtatgcataggatccaggctggcaagagcgaccaggctcctcctcccgcactcacagccccgtgaaaggggaggggaggggagggaacccgtctactcaactggtgggctcaccccacctcaaaggacagtgtgagccacagccacgacaaggcagtggcaagggctcctttcctcatttggccacaaaaacataaaagtcaagagctacgtggaaaattgttgcaaaacaaaacaagagtccgtgtgtgtgtgcttttcctccggcaggaaaaagcttccgagaacactgttaacagcagcctcatcccagcaggcggcagcaggagatagatggttaaaaaaaaaaaagtttggacatttttatttttaactttttaatgaccatgaactatttctgtaattatatcaaaacaaatacaatttaatcatccactttcaccaggtgaggtggctcacacctataatctcagcactttgggaggcagaagacgatggattacttgagcccaggagttcaagaccaacctgggctacaaagtgagaccccatttctacagaaaaaataaaaaaactagccgggcatgatgctgcatgtccgtagtcccagctaccggggaggctgaggcaggaggactgttgagcccaggaggtggaggctgcagtgagcagtgtctgtgccagtacactccagcctaggcgacagagtgaaaccctgtctcaaaaaataaaaaacagtccacttcctaaggctgcttttctgacactatgtatcaagatcctgaaacatgtgctagtccacttcctaaggttgcttttctgacaatatgtatcaacatccttcaaaatgcacgtactctttctcaagtacctctactcttctacttctaggaacagtgaggaaataaacacatgagcaaaaataacaacagaggtaggagaaaatattgagccccgcacaggcttggcattgctccatgtgctgtacctgtggtaactcactccatcctcatagcccgtctagggggtggacagtatcctctacctttacaggtgagaagccgagccacacagaggaagagaaagaacggagcaaggaaccatgctcctaaccaggacaacacggctgctgcttcacagccttgcctcgttttttttttttgcttgtttgtttgtctgtttgtttgttttttctgtttttcccgagtagagtctggctttgtcgctcaggctgaagtgcagtggcaccatcttggctcactgcaacctccacctcccaggttcaagcaattctcctgcctcagcctcccaagtagctgggattacaggcgtgcaccaccatgctcggctaatttttgtatttttagtagagacggggtttcaccatgttggccaggctggtctcgaactcctgacctcgtgatccacctgccctggccttccaaagtgctgggattacaggtatgagccaccgcgctggccagccttgactcttatgtgttcattcattagaattttaggggaattttagtaacatgggggaaagaatataaatggaatatagtgtaaattgtagcaaaaaataaatgcagaagcaaaagactggcaatgcacaccaacacatgaacagagctaatcaccagttcatgcaactactgtgtgtttttattaaatattcttctgtgtctttcaagttttcatcaatgaactcgtattgattttatgataatagcggaattcctatgtttgagacagaatggaaccatggcagcctgaggtctgaacttgccagagtgtgggagtatctgcaaactgcagcatgcccgtctgtgcttgctgaagcctgacccccacagccagaaaagttctgacactgagggccgggcgcggtagatcatgtctgtaatcccagcactttgggaggccgaggtgggtggatcaagtggatcagcctggccaacatggtgaaaccccgtctctactaaaaatacaaaaattcacagggcgtggtggtgcacacctgtaatcccagctactcgggaggctgaggcaggagaatcacttgaacctgggaggcagaggttgcagtaagccaaggtcgcgctccagcctgggtaacagagcaagactctgtctcaaaaaaaaagtcctgacaccttgaatggtgctgggaaaactggctatccacgtgcagaagaatgaaattagacccttatctcacacatatataaaaatcaactcaaaatgcatgaaaaacttaaatgtgagaccagaaactataaaactactagaaaaaaaaacatagaaggaaagctttaagacactggattgggcaatgatttttttttggtatgatccccaaaacacaggcaacaaaaacaaaaacagacaaatgggactgcaccaaaactaaaaactctgcacatccaaggaaccatcaacggagtgaagagacaacctacggaatggaatcccatatttacaagccatttatctgataagcggttaatatccaaaataaataaacaactcaagtaactcaacagcaggaaaacaaataacccaattaaaaaatgggcaaaggatctgaatagatgtttctcctttagatggccaacaggtctatgaaaaagggctcaacatcactaatcattagggaaatgcaaatcaaagccacaaggagatatcacgtcaaacctgtgagaatggctattagcaaaaatatgagcaataacaagtgctggtaaggatgtggagaaaagggaacccttgtatgctgttggtgacaatgtaaattattccggccattacagaaaacaatatggaagctcctttaaaaattaaacagagaactaccatatgatccagcagtcccactactgggtatactgttaacccttgaacaacgtgggtttcaactgcacaggtccactaatacatagattttttcccacctctgccacccctgctacagcatgaccaacccctcctctccctcctcctcagcctactcaacgtgaagacgatgaggatgaagacctttatgatgatccacttccacttaatgaatggtaaatagatttttttcttccatatgattttcttttccttttttttttttttttttttttgagacgcagtcttgctctgttgccaggctggagtgcaatggtgcggtctcggctcactgcaacatccacctcctgggttcaagcaattctcctgcctcagcctcctaagtagctgggattacaggcacacaccaccatgcctggctaatttttgtacttttagtagagatggggggtttcaccatgttagctgggctggtcttgaactcttgacctcgtgatccacctgcctcaccctctcaaagtgctgggattataggcgtgagccaccgcacccagcatttttttttctttttttgagacggcatctcactctgttacccaggctagagtgcagtggcttgatctcggctcactgcaacctccgcctcccaggttcaagcaattctctgcctcagcctcctgagtagctgggattacaggcacccatcaccacgctcggctaatttttctgtatttttagtagagacagggtttcaccaagttggccaggctggtctcgaactcctgacctcgtgatccacctgcctcagcctcccaaagtgctgggattacaggcataagccaccttcacaacatttttctctggcttacttcattgtaagaatagagtatataatacagataacatacaaaatatatgccaattgactacattatcagtaagacttctggtcaacagcaggctattaatagttaagtttctgtggagtcaaaagttatatacggatttttgatggcacaaggggtcagtgcccctaaccctcatgctgttcaagggtccattatagatccaaaggaaataaaatcagtatgttgaaaagatacccagagcattattcaaaacagccaagagatgggatcaacctaagtgtccatcaacagaagaatggataaagaaaatgtggcagatatacacaatggaatattagccttaaaaatgaagaaaatcctgtcatttgcaacaacatggataaacctggagaacattatgttaagggaaataaatcaagcacagaaagacaaattccacgtgatctcacttacaagtagaatcttaaaaagttaaactcaaagaaaccaagagcagaatggtggttaccagacgctggggagttggggacgtcggggaggtattggttaaaggataccaaatttcatttagaaggaacacgttcaagagacctattgcataccgtggtgactaaagttaataaaaatacattatatacctgaaaattgctaaaagagtagattttaaatttctaaccacacaaaatggtaagtatgtgacatcatctgtatgttagatttagccattccacacgtgtatatatatatatatataaacatcatgatgcataccataaatatgtacaattttcatcaattaaaaaaaataaattttaaaaacaaaataaagtcattgacacctggcaaggattgacaaatcatagctcaggtaaaggaagggtaaacaaattaaacaaagcttgtatgtgaaatagtgaaaccttaagaaatctctatacccttccatatttttaattattgtggtaaaatacacataaaactgaccatttaagccatttttgagtgcacagttcagtggcattaagtccattcactttgttgtatcaaccatcatcaccatccacctccagaacctgcatcttcccaaactgaaactctgtcctcactaagcactaactccccgctttcctcccccaagcacctggcacgcaccattccactttctgtctctctgaatcaggctactctagggaccactaagaagtggactcatacagcatttgtcctttcacatctggcttatttcactgaacataatgtcctcaaggttcatccacgttatagcctatgtcagaatgtccttgctttctctttttttttttttttttgagatggagtctcactttgtcacccaagctggagtgcactggcgtgatctcggctcactgcaacctccgcctcccaggttcaagcgattctcctgcctcagcctcctaagtagctgggattacaggtgcatgccaacacacctggccaatttttttgtatatttagtagagatggggtttcaccatgttggcaaggctggtctcgaactcctgacctcatgatccgcccaccttggcctcccaaagtgctgggattataagcgcgagccacggcacccggcctagaatgtcctcactttctatggctgaattctattccaccgcgtggacgagccacagtttattgatctattcgcccatcagtgggcccttgggttccttccacatttcagcagttatgaaaaatgttgctatggtcatggccatacaaatacgatgctgtttttcacttctaatttacatgtactatttctgtcatgtccatttctgaaattgtatttattaaaaggattacaattgaattacctaccgtgtaaggccacttttctggcaatatgaagtttttttaaagatggagtcttgctatttccacagccccgcttcctccactccctgtccagaccagccctgaacattccactcctctctgaactgggaaagtatcaaaaacaccatacagaaaccacccagccacaaagggatgaagtctctatttgccacaaatagagagggtgctcaccgcctgggaaggcacttccaaagcagcgggctccaggagggcaggcccacggctctctgcacctcagctcccaagagtataaaatgggcactggagcacctgccgcagggccctcccagctctccaggctgtgccagtctcagcatcccgcaccgctgccatgggcttcctcctgcaaccccagtactttccagtgacttcctcacactacttacaaggattatctaacagcgtggctccaggactgacgagggtatgcaggaaggagagctctcctatgctgctggggcagagaaaaccgggaacagcactttggtgactgactcaggaatacttggtcaagctgaagtatgcacaccagtgacccgccaggctcatgcctgcccttggggtcctccggtgcttgtctgaggagtcgggaggcggtgaacagacacaatcgctgcagcactgtctgtgcggactgagcatcccgaatccgaacatcccaaatctgaaacgctccaaaatctgaaactttttgagggccaatgtgatgctcgaaggaaatgctcactggagtattttggattcgagatgcttgactagtaaaaaaataatacaaatattcaaaaatccaaaaaaagatctgatacccgaaacactcctggccccaagaatttcaggtaagggatactcaacctgtactttcaaaaaagagaaaataatttcattatccagcaacaggagatgggtaagtgagctcgggttcatctggaatcctgaattatagttgaagcaaaatgaactacaaagaaaagaactacaaaaaccaacctggagaagtctcaaaattacggtgatctacatagagaaagcttgttgcaaaagtgtacataaaaaatggtaaaaatgttaaacacacaaataccccagctgtcacagggatacgtaagaggtggggtgaaggggctggcagcactctcctcagtctggggccacacaggcgtcccctccttgctgcctgctaaatggtacccacatacctaacttgataataaaatgcagacggagccataaagatcatacagcaacacaggtaacatataaacacaggttgaaaatgaaggaagagcagcccaactttacaagaacagtcatcactgtaggtaggaagaggaggaatggaggatggaacttcattatagatgatgctttccaaaatagattctttatatacacatatgggaaatgtacatgtgagttatggggaaggcgggaagcactgcttccttcttttccctcctaaagtgagaccataccatcatgtctaactgcaactctagactgtaagttacaaatcagtgcattcagcagccaacaagaatatactgtatttctccatgtggagctggcctttggatttgctagttatgctgaacataactggcaaataaaccatttttattaatggggaaaattcagagcccaagagtaagaaatatataatgataataataataataataataacaacagcaacaataatataataagtacaagggtaagatttgtattgaagagaaaatttcagctggtcatggagagtcacatctataatcccagcactttgggaggctgaggtgggaggatcacttgaaactaagaggaggtcaaaaccagcttaggcaacatagcaagaccccatctctgcaaaaaaaagaaattaaaaaattagccaggcacggtgacacgtgcctgtagtcccagctactcaggaggctaaggcaggaggatcatttgggcccagaagtttgagggtacagtaagctgatgcccctgcactccagcctgggcaacagagcgagatcccatccctaaaacaatacaaaacaaagccaaaaaagagagagagaaaatgtcttaggacttattacagaagcttttatgctttatgctatctgaccagtctagtaagtggagcacataaactgttagcaacaggaaaatgaattctacataacatctacatagttcatatacacataaatatatgtacataaatctagatatatcataaatatataaagtctacaacatgatgtgcatatttgagcaacagatatcagatgtcctgagatacaattcacctgttgaagctatacaaatcaatggttttaaatatattcgcagagttctacaactatcaccaccatcagttctagaacatttcatcaccccaacatgaaaccttcaacccatcagcagttactctccattttcccccaagagtccctcacccaggccttggcaacacgaatctcctttgtgtctctgcaggtttatctattctggatggttcatataaatggaaccacacaatatgaggtttttgtgtccagctttttctacttgacacggtattttcagggttcatccgcaccggagcgagtgtcagaatctcgctccttttgaaggcggaataacgtcccattatgtggacggatcacactttcttcatctacccatcagctgatgggccagatggttgttttgatttttttcctagtgtaagggttccgcattttcaatgattctaaacaaagcaaactccccgtccccggcatcaagttcacctcttcctgcagggaatgggctcctgggctcaccttctcctccgccgacctgagcacgctggagacctcctgcaccaccagctccagtgcctgctgccgcgggtcctcctcaaaggacaggaaaggtgggccctggaacagaggggcagcatgaggagggcatgcacaggaggggctgcatcttttaaattacatatctgtttaaagttctgaaaaattaagaaaatgtactaacacatctttctgtgaactctgtgcttctaatagcagcaatggctaaatatcaggagctctgcacatccaaggagcagctggtgatggattgtgctcagtgggcaggattcagttatgggagaaggctgggaaaggacaggaacccgggagtaaacctgaagatgctgcaggaaggcagcgaagggtgttttgaatcttcctgctgacagcataaggaaagaaacagactcttggggcagggctgcttcgtgcaaatcagaggatctgtgggtctagcggcgcacctcgcccagcacagagggctccaggctgtgtcctccctgttgctagggacagtcctctattctggtctaggagaggcacctctcctgttgcgtgtggttgctgtggtacgattacttagggtgccccccattctcctctcctaccccccaggggctggcctctccctgggatctgagagggtggccaagattccttggctggaaatgaacccgcctggtggctgcccacagagtagactcctcaacccctacttcacagccctctggagccacctggccccaaggttcacctgtgcccgtggctctgcatgttcccccagcatccttccaggaaactcggtcagctcatgtctgttctggttcttccagttaaaaatctccaagcaaagccaggcatggtggctcacaccggtaatcccagtactttgggaggccaaggtggaaggattgctcaaggccagcagttcgagaccagcctggccaacacggtgaaaccctgcctctaccaaaaatacaaatattagctgggtgtggtggcacacgtgtaatcccagctactcaggaagctgaggcatgacaatcacttgcacccaggaggtggaggttgtattcagctgagatcacactccagcctgggcgacagagtaaggccctgtctcaaaaagaaaaaaaaaattctccaaacgagagacgcacaattaaatgaacaggaccacaaggcaacaaggccaacgttttatgacgaagaacccagggcttatgtgaccaaccaagtcttgtccaagtcttgtctagctctcgagaggccaaacgtgtacatcaacaacacaatcccagatcgaaactctcctagaactctgttcctgacatgctgtagaaagcacaccgtgtttcaatgagctccgactgggtggttaaaaaacacacagccccacaagctcccatcgtatctcatctccaccgtggtgagctaggtccagctacaaggcgtgaccgagggtgggagaggggaagcggtgtaaaaccttgccgtggcgattccagcaagcatggtgcaagtgagcaagcgatgaggttacgctgtggctatttctcaagaatgcccaatgacccgcgtaaacctaaaggggacagaacattttgatttataggcttctaacctcacccttttcttacactgtctatctcatcccccaaaaatcagcagagaattaaatgtactgctcgagagggctgaaatcacagtttcagggctgctctgctggcattctctgtggtgggagcttgtttgagtgggacctgctggccagggccacgctctgagcttggtgatgagacggttctgtgcaccaggctctctggcctgagagaacagaacccagcacagaggccagtgccaggcagagaaccatgagcaggcaacatgccagccgctcggaggatgcagcggagaaacaatgtaccttctgtaggagcctaaagatacgctgttgccttataccagcctgggtgcagactcatgctcccctgaggcggcagatgcagtgtttaccctcttcccttgctaccttctgaattcaaaccttgaaaagagtttgcagccgggtgccacggctcacgcctgtaaccccagcactttgggaggccgaggcggacggatcacgaggtcaggcgatcgagaccatcctggctaacatggtgaaaccccgtccctattaaaaatacacacacacaaaaaaaattagccaggcgtggtggcaggtgcctgtaatcccagctactcgggaggctgaggcaggagaatggcatgaacccgggaggcagaccttgcagtgagccgagatcatgccactgcacttgagcctgggcgacagagcgagactctgcctcaaaaaaaaaaaaaaaaaaaaagaaaagaaaagagtttgctggaaaacttaaggtcaagggatggtctcacaaagaaaataagttattaagagagattgcttttccttttctgatctgcctagtccttgagtttcaggagcagggtgtgcctgcctgccacacacaaccacaaattcaggtatctctgcatctctgctgctgtgtcaatgctgacagaaccctcattccagaccccactccacttagactaaaggaagactttgtgtccacatagaaaaagaaacacacaagaattgccaggaaaacactgaaaaaggaagacaagggtgactagctccaccagatattaaaacagactatagaaaccccgtaattaaaactgtgtggctctggtgcaccaacaaacacatgcactacgaatgaacaatataaccacactgaaggggatgggaaaaacacggatataacctaagaagcttggaaaactgcatcttgactgcatataaatgctataatccagtaaatgtgtttcataggttgggaactcagaaactacttcatgcatatactagaactgaacacataagtagtaagtaaataagacagcaggtgtgcaatgtcttactcttggagaagggagttaagaataagaaagtgaaaaaactaaaatgaactctgtaccgttggactagaacccaaggtacaggatacaatcacggtttttcagataaacacagagagaaatacacagaaatatagacatgcgcacacacgttggtatacacacgtatgtttgctattgctgaacactgaaggggagcaatgagaaccaagaggtaatgaacacacttaatgcctaggtcttggtttctaaacacttctccaataaaaggaatcagggctgcttgaagaagtggctgaatccagggcctgtggggagccaaaaacaaatattttgtggaaacatgaagtaaggaaatgaaaaaaaaaaaaagtgggcttgatggaagaacacaagaggctactctcaaaggagcaccctgatggcccaaaggagaacaacctaagcaactgattcggtttggctctgtttgtaaccaccatgtgtcaagagagggacctgtaatcctcacctgcagagggagggaggtaactggatcatggggcagtctctcccatactgttctcatatagtgagttctcacaagatctgatgcttttctaagtgtttggaagttcctccttccttcttccctctcctgccgccttatgaagaaggtgacggctttccctaccatcatgattgtaagtttcctgaggcttccccagccatgtggaactgtgagtcattaaatgtctttcctttatcaattacccactctcagggaagtcctttagagcagtgtgaaaacagactgatacaacaatataataaatagtgatagtatgggattataacccacagaataaaatccatatccatgagtccatattgagctaaacaatcagataaatatctcattggaggagaaatgacagttctgtcttgcgggagagttccaaataataaagacagtaaggaagaggaaacagaaagtcaccatcaagagaactgcacctgcgccatcactgcacacaagatacaccaatggttgcgaaatcagtgaggaagagtttaaggagcaacgggctctgtacaggctcaaagcatctccccacactacctgttaactacagcaggaaagataaaggaggtgacatgatgtggatctgtgtccctgcccaaatctcatgtcgaattttaatctccagtgttaccagatgggcccggtgggaggtgactggatcacggtgcggggagttctcatgaatggcctagcaccatctccccttggtgctgtacagtgagtgagttctcatgagatctggttgtttaaaagtgtgtagcacctcccgcctctttctccccctcctgctctgggtcatagaagatgaccttcaccttccaccaggattgtaagtttcctgaggcctccgcagaagcagaacctgctatacttcctggacagcagaaccatcagccaattaaacctcatttcttataaaccaccagtctttctggcatttctttctggcaatgcaagaagggactaatacaggaggagacataaaatacaagaggatgaccccagcagaagtcaccttaaccaaggcaccaagctcagcatcctctacaacaagacacgctgacatcacaagccccagacacagtgcacaccacttctgtggtttgtgtaatctcgctccaaccatatgaaaatgccaggcaaatggaaagacagtcagcaaaataatgatcaacagtctttagttatcaaggtcataaaaaacaaagaaagactgagaaaccctgacagactgcaggtgatgaagaaggaacaactcaacgccacaggtacccttaatgggaccctagaacaatacaaggagacaggtggaaaactggtgaaattcaaagaaggccttcgcttttgttgttaggcattgtgacaatgttaatttctttttctttctttctttcctttctcttttctctctctctctctctctctctctctccctccctccctccctccctctctccttcttttttgagacggagtttcactcttgttgcccaggctggagtgcaatggcgcgatctcggctcactgcaacctctgcctcctgggttcaagcaattctcctgcctcagcatcccgagtagctgggattataggcatgcaccaccacgcccagctaattttgtaattttagtagagatggggtttctccatgttggtcaggctggtcttgaactcttgacctcaggtgatccgcccgcctcagtctcccaaagtgctgggattacaggcgtgagccactgcgcctggcctaatttcttgaactattacattgcattaatctccttgtgttatgaatcatagtaacatgccaccaatgttaatttcttggttctgatcattgagctgtggttatgcaaggttgagtgaggaatatatgaaagttgaattattttttcaacttttctgtgaaagcagttcaaaataaaaagtttaaaaaataagactttaaagagagcagcccacctttattgtctcactatgtcccaggcattttgctaaatgtctcacacagatctgatctcacctctaggagagtggattttgttttctggattgaatccagttttcccttctgcagatgatgcacagagactctcccaggatcgcacagctaggagggtagagctggagcacaaagcaaacccgcaaccagctccagagcttccccacgggcccttccacgggctgaagaagtgccttccctcctcagcaacctaccaggggcccgcgggagtggaagttagcgttgggggaattttagttgatgtgaacgctacacccacactttcctgaatccctgtcttgttgggagaatgggttagtgcaaagaacaaactgaactggcgcctattcctgggtttggcattgatgacttgcaaagtcatcagagcctcctttaatgttgatgctttagaagtgaaaaacaaagcacattaaacagcttgttttgcccaggcctggctggctcccaagacagaaggcctgagtccagatgggggaatgggcatcaccactgtttctcctcctccagaggcccatgattcaccccactgagaccagggcctgccccgagccggctttgtgctgggcactgggtctggctctgcccagacagcccctggctctgccccagctcacaatgccgggagctgaccagggcataagtgactccgggggggtcgggaggagggcagggcggggagcatcttggctgaaggggaggatcagggacctctgagctgagacccaaaagatttagagaagttaaataagcaggaaaaaagataagaattccaaacaaaaggaatgacccgtgggaaggcccacacaggaaaggtccctggacactggagcaacagaaggggtcacggtggagggtgcagggttcacagccccaaagaggcccaagttccttctactggaggagggaagggcagctccatggtccttccccacagtggtcaccacagttctaccaactggcttcctacaccacagccactgtcattggtcaaggagtttggacttcgtgagcacaactggaaggtcattatataatgcaaagactctgaagtctggtggccactttgtttactttttaaatgcagaaactcctattcaagtcagtgctattaataatatgttccaagtccacacagcatcttttttttttttttttttttttctttttttttacaaagaccataatgatcatagtcttgatcatttgcaattagaacatacctctaaagaaaccctgggctgaaggactaaagaaacaaacagcgttggggaccctcctagtccggggcctcatcccactcaggtgggccgctaccagacaagcccagagcacaggccacggaacacaggcctcgcttcgggacaggtgctgcccacacatggtccagacagcatcagccttgggaggagttctgggcagcccacgggcagcggccatcagaggcaagcatgctggatcccagagtcgaggagactgtaggacagcagtcccggagactcccaaggggatgttgggggtgtaactgattatcatggaccactttgtaaatattgatgtaatcgcaggggagcaaaaggaaaagctcaactgctgcttttggataccataatattagttctcagtctaaggagcctgacctgagactgagccagttctgggatcttctgttctgtgtgaccaaagagtgatcacatcaatgggaattaggggtctgcaacaccacaccaagtggagaggcaagagtcaaagctcaaacaattgcttttacgtggtgctgggtgaaagaggaactctatttacactgttggtgggagtgtaaattagttcaaccattgtggaagacagtgtgacgattcctcaaggatctagaactacaaataccatttgacccagcgatcccattactgggtatatatccaaaggattataaatcatgctactataaagacacatgcacacatgtttattgcagcattattcccaatagcaaagacttggaaccaacccaaatgcccatcaatgatagactggattaagaaaatgtggcacatatacaccatggaatactatgcagccataaaaaaggatgagttcatgtcctttgcagggacatggatgaagctgaaaactatcactctaagcaaagtatcacaaggacagaaaaccaaacaccgcatgttctcactcataggtgggagttgaacaatgagaacacatggacacagggcgggcaacatcacacaccagggcctgtcagggactgggcggctggggaagggatagcactaggacaaatacctaatgtaaatgacaagttgatgggtgcagcaaaccaacatggcacacgtatacctatgtaacaacctgcacgttgtgcacatgtaccctagaacttaaagtatcataataaaaaaaaaaaggaaaaaaaagaaagaggaactctgatggatggcaagtgtgtactagcagcttctcaccagtgattctcaaccatgggacactctcaaagtgtgctccccaagcctactgaggcggatgtggggggcaggcacgtgtgtcactaagctctctgggcaagactcctgtgatccctgcacacctggcgtccacctggccagcaggcagatcagcaatggtttcctccaaagtcagtgcaaatcactgtcacatataatttagacccctttctggagtgagggtgggaatccgaggtcccctgcaatacggggagtcagtgctgctgcagtggtcatcagagagcaggaggactcctccggtgctgaccagtccttggatcctggaaggtgcgagccccactgtttgggataacacattaacaactctactctctgagctcttctcgctggctctcatttaaaggaaacatttaggtctccaagttgatactgcatcccaccagggaacaggctgcagccaccaatgcgcagaccttggcaaattcctccagttcacgggcctcagtctccccttctggagaaggggcttggctagaagagtttagggtttctttccatcttaaaatacaaaggtggggtaaaacttggaatgggaggagttattgtctcaattggacagaaaattccacttttcagacagaatgctggacatgattaagttattaccagtgtcttctcaatccctaagcgacaggccaagaactggtctcctccctgggtaggacagagtgatatcaggacaaggcagaggcaggagggggagcactaagctgtagctgtccaggcgagagcgggcttggagtgtcagccctaatccgggattagtgggaatggaggtgggggagggcagccacgaatggacacagcagcccctgctctcccacaccgccatcactgtcacaacagcgatggcccaggatgctgggatgtgtgtgacaatcgctggactcggggcggccaggaatgcaaacaccactacctgctcacccacaatgccatcactgacacggcagcgacggctcaggatgccgggagggtgtgtgaccgtcactcacagggagcccagtcacccagatcctatctgcctgcaaaaccttccatttgaatgcaaatcaaatgacattcccaggcatcagggctgtgttcccccacccccgtccccaggaaagtaagcaataccaaaaactgacatcacagaactaatggactatgtccatgcaaaaatgccagagatggccctgggttgctttgagcatgaatccgggacactgttgcctcttccaggcaggaggtcaggagagacaggtgtctgagactgcagtgtgtggccaacagcagagagagaacagagaaggcgcaaacaaggtgagaccctctctcctctccctgaacgcaacccctccctgctcccacacaaagactcaagtaaaaagttttcatccaaaactttcaaatatttctttcagtgttctcagattgacttgaccagcctaagacagatgccagggacatcctcttctctgcctctcaacacttcagtcagatgggaatatggaaggatcatatccaagaggatcatattttctgaagccaatccatagatgtcaggaaacgaaccatcccaaatatacaggaggtagggtcactgcctctaagcctgaaactccagagttagaagctgaacttaaaggtcattcacccaacacttgcctgcctcctacaaaggacacagatgagactggtgcccaatcaagccaccagcctggaggggactcagcctcagaagccttgattccaggtcagtcaggggtcagtgatggcagcttcctggggaaatacctgcatttgctcctggatgtgaggccaacaggggtggagggctcccacaagagacagctggtttccctgagacactctccagctctggacagctgaggcacagattctgggcaccaggacaaaagtcagtcaactgaccctgaagcctttttcctccaaaaagtacagtcatttatgttctttttcaagagttcaaaacaaggtctcttgatttgttggatggctgctaactgatagtcaaagcttttttgttttttaattccatggccatgtcttccaaggccatgcacaaggaccaggcacagggcccgccatggaatattttgaaggttgatggggccggacattgaaaatgagcaattctgctatttccacagcgaatgaccactgagctgcacaggcatgtgcaggaaactgtggcctggaagggcggagcagcggccaagactaggggtgcctccccaaacccacccaggctccaacttctcctgtgaaatgcctaagaatagtacatgccaggagcttgtcgttatactaagatgtcttaaaagcaaaaataagtcaacgagtaatcagcgactacagaaacacccacaggactgtgaggcagcagaggtaagacacgaggcccttagcttgcaggccagggcagctggattcacatgccagctctgccgcccacgagctgtgtggcactgggcaggctgcttgccctctccgggccttggtttcctcatctgtaaaacagtgataacacccctgtcccgggagttgtgaggattcagagatggcagacgcaccgaaagcctcggtaggatgtctgcccagcggctggccctcagcaaacggtcactatttttatatgccaagaaatgcaagtctttggagataaattcttggtgaaattcagctctatgagaggcggaagcacattggggtcacagctattcatgtatcatgtgcaagctcagtaagtgtccgatcgggcacgggaattcgccccgggactccaggcaaggcaggtactggctggcgcggatgagcacttctgacggtccctccaactgccagcctgtccctcgcggagcccagggcctggagcacctgccgtttggagaataaaatcaatcactttgtcttgtctctccgtcaaggggcctcgctcccccgtctctctcctaactctcgaggatggtctgcgctggggggaggactcccttagcctgggtcaggggctgcagcgacgcctccaggaaagacctcggcccggaccgcccgccccggcatctgccgccccccggcccgcagtcccggaaactcacccctttcctctcggcctcctcgttcagggcggtcacccaggccgcctgccactggctcctccagctgcccagcgtcaggatccaggagagcagcgcgtcggaccccgggcgcggcccctctccaggctccaccgcccgccgctggggctggggtcgcgccctggccagcgcccactgcgccaggtacaggcctaccgtggccagggccgcgacgaagagcgacaccagcgcgagccactgcgcctccccgagccacgagcccagccgggccatggccatggcgcatccccggcccgcctcgccccaacttccccggcagccccgggccggaacggcggactcaggacacgcgctggctgcggccacagcgcgctgggggcgtggagggggcgcggcggggtcggagcccggcgaggagcgtggccgggggcctctgggcgggcaagcggggaggaaacgcgcggcggccgcggcccgggctgggcgcaagccccgcacacctgcggaacaggggcgcgagcggaccccgcggcccgcgctcccgactcggcgtctgggaagttcctgggccgctgcgggccgcgcttcctcctgcgcgcgccgccccgggcgtcccgcccgcggcccagcggtggccggaggaggctctggccgcggggcggggcggggcgggggcggtgcccgagggagggggcgcggccgggcctgcgggggccgcagtcctcccccctgctcccaacgcggcgtgcccccgcccccctaaaggcccggccttcccggccccgccacgtgcgcgcgtcgcccgcccctccggcgcctgcccgcgggccgcgaggtgacccgggcctccggattcatcagcccaaccccggcggctgctgtgcggctgcttggcttggctcgtgtgcgcgcttgcacaagtgcgtgtgtgtgcacatgtgtgagtgtgcgtgtgcacagcgcgcagtcagggtgatttcgaggactgccatttgctcgccagcgagacaggatccaggctcagtcctcggaaagtccctggaaatccgtggctgcccctggagccaggggctgggcctgccttagggggcgtgcttctcagaggcaaggaggggctcagcaccaggcccaggccctgccttctgtgtggctgtgtcattcattcagtgtgcgggtggggcgggggtgcatgtggtgtgatgtgtgtggcgcatgtggtgtgatgtgttgtgggtgtggtgtgtggtgcacaggatggtgtgagtgtgtatgtgtggtgcatgggtgtggtgtgtgtgtaagcgtggtgcatgtggtgtggtatgtgtgttgcgtgccagtgtggtgcatgtggtgtgtgtgatgtgtaagcgtggtgcatgtggtgtggtgcgtgtgtggtgtgtcggtgtggtgcatgggtgtgtgtacgtgtgatgtgtaagtgcacagcatgtggtgtatgtgtgtggtgtgtggtgcacaggatggtgcgagtgtgtatggtggtgcatgggtgtgtatgtgtgatgtataagtgcagtgtgtgtggtgtgtgtgtgtggtgtgtgtgtgtgatgtgtaagcgtggtgcatgtggtgtggtgcgtgtgtggtgtcggtgtggtgcatgggtgtgtgtacgtgtgatgtgtaagtgcacagcatgtggtgtgtgtgtgtggtgcatgtggtgtgtgtggtgtgtatgtgtgatgtggtgtggtgtatgtatgtggtgtgtcagtgtggtgcgtgtgtgtgtggtgcacagggtgatgtgagcgtgtgtgtgtggcacatgggtgtggtgtggtgctgtgtgtatatgtattgtgtaagtgcgttgcatgtggtgtggtttgtgtgtgtggtgaacacggtggtgtgtgtatgtgtggtacatggatgtggagtgtgtgtatgtgtaatgtgtgagtgcggtgcatgtggcgtggtgtgtgggtggtgtgtcagtgtggtgcatgtggtatggtgtgtgtgtgtgtggtgtggtgtgtgggacatgcccctgtgccctcctcttgcagagtggacgcggtccttagggagtgccatagaaacatactagcctgagattctccggggcctaaaacaggcctaaaccataaaaaagtgattcccctgttattttctgcagctgtattaaggggacttgaccttgaaaggaattagatagactgagcatttggccttctcttccctagccaggagtctgctgcggggccagtggatggtccatcagaggggattctggccctgaatccgtgggcccggattttcttcaggaaagaggaaggaatggcacagcagctggacggagagcctttgtggggaacaggataggacgctgtcagggaggtgaaattagacggggattgcccaggtgagctggggatggacccttgcgagccaggtctgttatcagaaagtggaaataagaatgagactatccatcctggctaacatggtgaaaccccgtctctattaaaaacacacacacacacaaaactcagccgggcgtgatggcggtcgcctatagtcccagctactcgggaggctgaggcaggaaaatggagtgaacccgggaggcggagcttgcagtgagccgagatcgcgccactgcactccagcctgggcgacagagcgagactccgtctcaaaaaaaaaaaaaaaaattaagaatgagaccatcagcatcctgcaagtgacccatgtgttacacacgagcgctccagtctgccgcagcctcttaagggtggggggaactgctcttcttttcttctattctgtgttattttaggcagaaacaaaagaaatcccttcttatttggcagaaaagtctaattatgttctgacctgtagctagacctatgcagtcagataattcgagtcctgctggtccccttgccagaataaccggggtgaggaatccgagggcccagtgttccccgtgccatgtgtgcacacaggccgcctgcggctgtgtgggcagtgacgagagcctgtcctgtgtgaccggtggaacccgtctcattccttcaggtctcaggtgtgctggcccatcccacttacttatttagaggcttgtaacaaactgtaaactaaccagcacccctagtttgggatttgtcacacttccatgtgacaaattttcttttctttctttctttaatttctttctgtattttgaggcagagtctcactttgtcacctagactggagtgcagtggcacaatctcggctcactgcaacctccgccttccaggttcaagcaattctcctgcctcagcctcccgagtaactgggactacaggcgcctgccaccacgccagctaatttttgtatttttagtggagacggggtttcaccatgttggctaggctggtcttgaactcctgacctcaggtgatctgcccacctcagcctcccaaagtgctgggattacaggtgtgagccactgtgcctagccccgttaagtgttttcaaagataatgtcaacatgtagatattggattacttacgtgtagaagcaaatcgagggaaaataaggaatgatgcaggcttgcaggacaatgcagttggccaaaacacgaaatcggaacagaaacatcttataaatctatgaaaaagagcaggctccctttacacaagctcccagccctacacatccaccaactcccagtccccttctcccactgcagaagacactggagggctgggttctcccagagcacaggattctgcctcacccccagtgacatttcctgctcccggcacctctctctccaccacatctcccttccacccaaggagtgagactgcagctctgcccggggagggcttctgtctccaccaaaaccttcaaatgggtctctgtcactctgcagtggttgtttgctatttttagctgctcataaagggaaagcactgtggctgtggcccctcctgcatgctcaccttgagctcccagctcccagctgtttaggtcaagctaagcccgcttcccatccatctgctgggtccaccagaaaccttgaaccagggctgccttcgctagcatggcaggcctccaggcgggaaggaggaagccaagtgtctaaattcttcataatgctttacagtagctgggtttgaggccacagtcaagagccactgttctatttttcactttaaaacatttctaaatgctggtggtggagatgagaattgtctgttggatgatctctgctgagtcacccagtcttgggtgcagtgcctcatccctgcctcaaagctgtaagtctttgaacgtcttcctctcccaagcccaggaggttctgggatgctgtgacatttttagaaattaatagatatgtctagtgtcatgtatgtcatgtatcgcacgtctataaacagttatactttgttatacttttgggttttaaaaaattcttttagaaaaatgtgggacttttgttaagttttcaatgtcattcttaaatttctagaagcagggaaaagaagagcgtccaaaatgtttatagtttgtctctgagtgaaaagtttccccttcaccctgaagcagttcacattattagtattgcttgaattatcaagttgtgccccaatattgtgagaccagcaccttgggggccccggggagctgtgatggtcacttcacaggccctaccagggacctctagcaagtggaaatacacagcttccccccagcagcacttgggggcagacgtttcgagaattccctcttagcaaaatgcttttagcacttggctcagtgccctcggcagctgctgtgggaagcgagatttctggagaccagagaggctgtggagacatttgacccaatctccttggctccatctcactggcttagtcatttccaccacctggaggctggaatgtgcttcgagtctatttcctgtactgctcacagggtcaataccggagccggcggacccaaccaaaggtcacccgtggccagagcctggcccggcgccagacagggctttccccccgaagaggggccgtgagttcttctagtaatcatttgcatgacttatggagatgctgttcatgatgccttccccaggaggaaagcagcaatgctgagtaactgcactaactccccaggtgagcctcagatgccgcgtgaacagtctctgagagtgaagaccagactgcacgtctgccgtccctcccaggaccgactgatggaaatggtagtgccatcggctgagcccctgccaccctcttgctccctcccgggtccccacagatgcaccaggcaccctaagtcaccttacgggcgttcagaaagtcatggctgtgtgtaccgagcatttcccaccatcagataccacctgggtactcaacttcatggactcgcttcattttcacagcaacacgcaaacgagagcatcgccccattttaaaaataaggaaactgagttcagagaagctcagtaactatccaaggccacccagcaagaaagtggctgaggcagggtttgaccccaggggccgtgttctctccatctcctttcataaaggtcaaggcaaacaaattctccaaaaagagaaaaatgttaaaagctggaaatagaggccccattgctaacattcatgtgcaaagatctgcctgaagaattgtcttttgtgttctgaagtccaggagacatggcctctcaaacccagaggggaagttcactcccggagcttctgtgaagtcccaagtcctttctgggaaagacgagagatgaatccagccctagcatttgccgtgatcagtgtctctgcacaggcgcccacctaggagagcctcccagggtgtccaccacccaccctaacagtgaacagcagatacgctgctccttcaaatcccaccctggtggcggctcctcagggaccctgagtcacgccatgatgctgggaggcggccgggcagcgtcagaggcagggcctgccagcctgctgcaggccagccaggcctgccaagagtctgccccgggcaaccccgatgatgcatcctgcgagtctgtgcccatgccgggcagacgaaggaatgtggcccagatggctgccctgcctctgccaggtggcttggttaagcctcccttgggaatgcccaggagcaaggtgacttgacatttttgcctgtacccaaggctgggaccaattttatgaatgaaaatatttaacttcgattctttttttgtagaggcggggtctcactgtgttgcccaggctggtcttgaactcctgggctcaagtgatcctccatcccccatttttttttttttcttgagacggagtctcactctgtcgccaggccagaatgcagtggtgcaatctcggctcactgcaatctccacctcccaagttcaagcgattcccctgcctcagcctcctgagtagctgcaactacaggcaccccccaccacgcccagctaattttttgtattttagtagagatggggtttcaccatgttggccaggatggtctcgatctcctgaccttgtggtctgctcacctcggcctcccaaggtgctggcattacaggtgtgagccaccgtgcccggcctccgcccccaatttttaaatatatttccaaggaggccgttgcataaattgtctattttctccaactccaaagaatgctggtcccacacctatgcactgataaccaaaatcacactgttgcaggaattgacctagaggaattgacctcatgatgtgttcctgggccgggcccctgtaatcccagcactttggaaggaggccgaggcaggaggatagcttgagctcaggcattcaagaccagcctgggtaacaaagtgagactccttctctattaaaaaaataaaaataaaaattagccaggcgtggtggcttatgcctgcggtcccagctacataggaggctgaggcaggaggatcatttgagcccaagaggttgaggctgcagtaaaccatgtttgcaccactgcactccagcctgggcaacagagcaaagaccttgtcttgaaaaaaataaaaaaagatgtgttcatcatgtagaagttgagtttgtaaggatgtgtcaggtggcagcaggagtctggagagagggtgcacggaggaagagagagatgacttcgctggaatgagatgacccctccccatgctgagactctcaatgaatgccatgcacagcctccagctaggggtggccacagcggggccttgctcgccttgctcgctggggacagcccctaggctgcaggactagagttgctcctagcttctcagaacctgcgggatctgcttctgcagctccagtgatatggccgttcccagcactgactctggaataacacttgatctataggcggctccactagaaaagagccaagccccgcaagtcagaggggtctccccttacccaacacaggacacaggaaagctgcccttattccctgcaggacaaggcacatttcttgtaattagtgctttgcctgtcttctgggctacagttttcctttctactattgtttttattgagcacagtgagtagaaccaactaaatatctggagggatatttagtctctttaagagttaaaggaaatcccattaaagggcttttaaaaacaatccaggagcatgcatttatctacacataactaagtactaattacaaataattattatatattccagtggttaccccaaatagtgcaataaagacgaagggaataattttcctgctccaggaaatactcatgcttctgtttgcctagtactttgtaagaaatcctataacaagtaagaggcaggaattatcacccccatcgtgggaatgaggggtggaagcttagagacgctgagcaacttgccaggggcaacaacaacgtggttggggttagggttaagaggcggagctagacctggactccaggtgtttgctgcgtgatctcccatgttgcaccaagcagcgagtctatacgacacccccatggaattagagaagagcagctcattgacacagatttattgcaatgcgtcatttcccccgatttcgatggatcatcatctcctctagctactcagagcagggagctgggactgaactatagtacgtgaagtcattgtgtatattctcttagtgtgtcatttccccgcggagtcaccttccagaagctctgccagctccagctcatggggcccgagggagggatggaccctgcagagtgggcggtcaccactatcggggcatccatgctgcctgccagtccagccccttccccagcttgttctcctgtccagtcggctaaaggggcaacgaagaggaagccagagactctcaggaaggaagcagccccagctcctcctccgggctctccttttgttagtattatggcaaaaaccacaattacatttgcaccgacctagtagaagccccaggtgacagggagaggggcactggtgggtcccagtgggagagaaaacagcctcacaagcccttctctttcagtctgtgaagcgcatcacggcctccctcgcaggtgggtgaggcgtggctgtcctcatgatcctcacaactgttgtttgaaccaggtacctctgtgtccagcaaaggggtggggactgtccccatctcagggcgctgcatagactcacaaaagcagccttcaaaaggcatggctgggcttgattttaaaaggagtctcaagtctctccccgaaaaaaaaaaaaaaaacaggaaaagggtggccaggttaagcccgctgggtccctggtgttctgaagcagggcaggcttggtggccttctgtcactgagaagcagggggtctgtagaaaggaaaatcacagaaaaagaaaactgtaggccagaacacaggctgttgctgagccgctggacgctagccccacacattgaacagtgcccttcaaaagggaactggagaaagaatgttccaggattaaaaggtgaagtcagggaagctgcacaacctcataaatccatgcaaacattcctaaaaaaagaaggtgtcttagttcaggccactagaacaaaataacatcccgggtggcttgtaaacaacatttatttttcaccaggctggaagtctgagatcagggtgccagaagggtcaggttctggtgacgggttgctgactgccgccttctggttgtttcttcacatggtgcgaagagagggagggagctctctggggtctcttttgcaagggcactaatcctattcacgggggctcaaccctatgacctcagtgtcacttcccagaggctccatctcctaataccatcacactggaggtaaggacttcaacatgtggattttgggggaacatgaagggtcaacatgtgaattttgggggaacaggaagggtccttcctctgcaggggatgtcagggtgggaacgctcagggaacctggcagaggaccctctgtggggcaagatccttagtcggtgcccagagactccttggctaggctgctccaaggaacgcaggttccagggcaagtccgcagaaatagcgaggaaccgggttaaagcacccagaatctcagccagtgcaatggacgctgggctgtccaataaatgattgaccaaagatcctttaaagggaattgaaaagatgaaaaagaaattagatactgccacatttttattttagccctcatcaaaatgccaaggcgggcagatcacgaggtcatgagttcgagaccagcctggccaacatggtgaaaccccgtctctactaaaaatacaaaaattagctaggcgtggtggcacatgcctgtaatctcagctactcgggaggctgaggcaggagaatcgcttgaacctgggaggcagaggttgcagtaagccgagtttaccccactgcactccagcctgggcaacagagcgagactccgtctcaaaaccaaaaaaaaaaaaaaatgctatgaggtggatgaaacagatgttattatcactgttttgcaggtgaggaatccgaagtcctcatcaaggaccctccacttattacaaattcagctgggactgaagcggtgtgtccgcagcttggacaccaaacaggcgacccctttactagctgagaatacgcctctgtgaagacaagtgactgcaaagcagcgaagcctcagtcctgagagcatttttctaagacatcagttccatcagatatgtctttgggaatcatttcatactcagccaagtgttagaaagggctggttggcattatttgctccaataataaatccatgtgcgctaatgttcgtcaatgctgctctgcagggagaagtcaaagcacgcaagccaggcctccatggggaggcccgagatgactggagggtttgtgcctaagcatttgttcagatgcaataatccactactcttggggagaaaatgatccttttttaaaaattattttgtctttttaaaaaactgatctaacaaattttgcagaattgaaggagcaactgaagcaaagttttcttgttgatagaggtgtgtccggtgtgcagatgtgtcctttggagactgggtcgacatgtcgccatggcactgtgcctgctccagtccctggccagccctccatctgtcagcgacagcacacgaggtcctcctggacagagagtatccagtactatggacactgtggacacagaaaatgcttccttcctctctaaatctccccaggagggctccctggtgaggcccaagggaggtgatccagacagccatctcctcaccagagcttctcctcccccctcaaacgatggagagaaaacatggagatgcttcttgccggcaggtttataagattcaaagcttctggtgagaagcagagacaaggtagtatccttctgtgttggggagagctggccactgctgatgccatagctgagagtcccctgcagaagctgtcccaggaggccacaggaggggttgtcctggtgcatgccgacggtagcagagctgctactcctgccggtccgtccctggtgtttaatgagcccgtcctgagatgaaggagggaaagtgggggcaggcaaaagagagaatgtccattgtgccaggaggcatccccgccttcctcctgtagctctgggaccagctgcaagaaggcaaagtatcataccagccttttgagaggggaggctcagaagcccatcagcagacgaatgagcagacagaatgcggtctatccgtgtgatggaacattattcagccgtaaaaaggaatgaagcactgacccaggctacaacacggtgaaccctgaaaacgtgatgctgcgtgaaagaagccactcacaaatgccacacgttgcgtgattcaaacgccacacattgcatgattcaaacgccacacattgcatgattcaaacgccacacattgcatgattccatttacatgaaatgcccagaataggtgagtgacggggcagaaagcaggtgagtggttacctggggctaggggtgggccgacagggagtgactgctgatgtgcacagggtttctgtggggggagatgaaaacattctggaggactagatggggtgacggatgcacagcctttgagtgtgctgaataccatcaaatgatacactttaaaatggtggtaatggtacatgtaatgttatgtgtatcttaccaccgtttaaaacagagcttgaccggttagtttaacaaatattatgagtggcttttgttatgggccgggtgtggtggtttgttcactgatttggcaaatatttgttgagcagctgccgtgtgtcaggtgctgggctaggtgctgggggttagtgatgagctaaatcaattctcatgggacctgaactcagcagaggagacagagggactattccacaagtaactgtgtaaactgcatgggtggcagggcagccgtgcagctaggagtagtgaccaagaagagtccaaggaaagccctgcaatgccactggatagtgggcagggggctcaggcaggactgcaatgagcctgtgggttttgttcctacagcaaaagaaaggagtggctgacttggcagagaagagatgaaatcatatttgcatttgaccaagatggagacagtagggggaggaggtgggtgacctggaggctcacctgggatggtgagccaggcccctcagggggtggtgggtgggagtgggctgtagaggttgccatgcaggggtctcccttaggcagcatagtgggtgtgtggggcaaggcttgtgagaaggggccaccccagcaaggataaagcgatgcctgcccacgggagtatcacgttggtctgagatgcaagaagaaagaaacggagaggaccatggagggggctaagaaattctaaaggcaagaaacagtcagggaaaagaaaggattccacggtgggggtggcagagaccgagtgctgagccagcgccaggcgcccaccctgtgggcacatgttataaagcagcaccatgaaatggaacggcgaggctccccaacaaaacagactctagaaactgatggctgggtgtgaacataacaaaacactgggaagggacataattagtaaatcttgggatgaattatcaaatgggaagagaccagtgaagtcaaccaggggggcccaccatgcgattgtccgggtgaggaggggaggttgggcgccttccctggcatgcaggttgcccccatcctgcctccagggctcagggctctgagaggacatggttgcagcatgaagggcatgggctttgcctcctccactgtagggtgggagccagtcctgctgcaaagagccgctatggggttggaggtcacacatgtgcacagacatggcgcctggcccacggcaggtgctccatacagcacaggaataatggcttcgttacacagagccaagaatagggaagaatttgttttgctctaagtgcaaccttcacgccaagcatatttaacttcgatgaataagcagcaaaaacaaactttgggttttgttcctacagcaaaagaaaggagtggctgacttggcagagaagagatgagatcatatttgcacttgaccaagatggccccaggagataatgggaggaagggggtgaccctggaggctgatctgggatggtgagctggccccctccactgtcgaatgtttaaaaaacattaaaaatgagtcaaaaggagaacagaggaatccgcccctagctggtgatgcttctttttgttacatacaagtgaagagagtatagagagtcattcattcattcatgcagctcatctggactgagcatctactgtgttagagagaccacgtataaatacccttttaaatgtttattcagtaacgaagatattcctgcttctgacttctccatccaggtcttggaatcaccacctctcacacacacacccaggaatcatctctgtaccagcctccttttctctaacctcgatcccatcccatctgaccaatcagaaaccaaatcccaccagccttctctctgtgatcgaactgcatcttctttcttcttccccactgggtccatctgctggctctctagctggaagcttctccacaccaccccgcacccacctgccagcccagctgccgggactttggaacagacctggctgtggatccccctggggggcttccaagctgtgtgaccttggacatgttatctcgccctcctagtgttcatcttccccatcaataagacaggcatgaagctgcctagctcaccaggctgtggaaaggatggaagaccacagcaggaggcgtgaagctcctgcatggtgcccaacacaggcgagagggcaggtaaggtttccggggcctacctcatgcaagtgtcacccatggctacttaggaataatttctggcactgggctcccctatgttccctccacatacacatttaatcaccttccattccccatcccccagacctgtcccctagatccttggccagtgctctttgccacagtttcccttcccttgggcttcatcctgctgaagacactgctgacccggctgcctgcagtgacctgcaagcctgcacctgctgcttcctgaactctccttaggtgctgcccagagacacctcctctatcctgtggaatgtcatggggacctggattgctatttcagatttcatgtgtgtgcctatcgccccggctggactcagttccttcaggattaggaccaggccttatggtcctttgaattcctcctcaaaaatctgcaggttttccagaaacatctcttgatttcaattagaggtttgtagctctagcaccaaagttaagttggatctagggctgctgtttgcaagacgtacttactaatccaggtgggcacaggccatgcagcagccaggccctccagtgctgggctggggctgccctgccccctcccctctcaggatcagtcctcccgtggagacggggtgtctttctggggtgcagaagcaaccactcactccttggctttgaggcttcatgagaccacagggaagcgctcaagcccctcagcctggaaaacaatgccaggcttcctttctcagataatccctctgatccctgcccccctgaccctccacaggcacatccagcctcctgcagggctcctcagaccccaacctgcccagctgttggcatcacccctaccattttctgcctgcagatccctctccctcctcacctgaaaatctctctcctccctccaagaatcagatcacggttaccccttagcagtgtgagaaataaactcacctgtccaagcccaaagaacagactcagagacctggagaacagtgagagtgagacttttttttttttaattgagacggagtcttgctctgtcgcccaggctggagtgcaatggcacgatctcagctcactgcaacctctgccaccccagttcaagtgattctcgtgcctcagcctcccaagaagctgggattacgggcctgcaccaccacaccctgctaatttttttgtatttttagtacaaacgggtttcaacttgttggccaggctggtctcaaactcctgacctcaggtgatctgcccgcctcagcctcccaaagttctgggattacaggcatgagccactgagcctgtgccattgggcctgagagtcagactcttaatgatggtcttgcaaaatcaagtgtctgatgggcagaaacacccagcacggttttaacaagtaatttatcccctggtgtgcaggtccctcccctgcttcctcattgctgctagtcattagcacaccgggggtcacaatcttcccagacgtcgcctattggttgttgggcagggacttcaggtgttttttttttttttttgtaggattgtactgctgcactttgttgcagcccacaatgcattgcaatcgtagttagctcaagggctcttcaagtatttaatttatgaccgaagtagccgggcaggctggtaagaacagacaaagtgagctattttgaagggtagtaaactttcgtcttagactaaacttttttgcttcgggtgacagcaactgagggcagaggcagcagacaagcaggcgttgacgatccaagcaggggcctagtgtatcctgtttcttctgtagtttgctgacctaagctgattcaaggcgctttgtcttggaaatggagcaccgtagacatgatctccttcagcaggaagtgtcacacatggattaacacccctgactccaggtctgactgtttggcgtcaaattctggctgctgtgattttaggtaaatcatttcgccttgctgcccctcagtttcctcatctgtaacatgggaggaatgagactgcccacttcttacagtctctgtgagaaccagataactaataagcacatgtgcaagcacagggcctggcacaaggtcacttccatctgctctcggtgtacagtagacggtcaccccaagatcaggtctgtctccttccctcactgtcttgttccacttcatatcccagcatgggatggggaactggtcagatggggtagcctcaacagatggttgttagataattgaataaatgggtgaatgaatgaatgaatgagtgaatgaatgcaaatgacaaaaaccaagtagcaggttttcttttctttttttttttgagatggagtctcgctgtgtcgcccaggctggagtgcagtggcatgatctcggctcactgcaagctctgcctcctgggttcacgccattctcctggctcagcctcctgagtagctgggaccacaggcatgtgccaccacacctggctaattttttttgtatttttagtagagacggggtttcaccatgttagccaggatggtctcgatctcctgacctcgtgatcctcccgcatcggcctcccaaagtgttgggattacagacatgagcccccgcgcccggccgagttttcaagtgcaattttgtttggagtcccagaatctaaagtcaccctgttggtgaaaaatatgaacttcctcttgcatcttactcagggcagggggttagtgggacaaaagctgctttcagtctcctggccagtgcctctgagtaacagcccttttgtgaagggcagaaaggagagtgtgtagttgtcaggaatattcaagcagaaccaaagctgacatcacgcctgtaaatatgcatgcatgcccacagctaccctggtattggctggctcagcctgtgcagtgataccacacacacacaaacacacacacacagctggttgtccctaactgctgctagtcactagcacaccgagggggccagggtcaacatcctcatgaccgttcctagtggcttccacagagcggggacacaacagcaaatcagcgctggcgagaggtttgcagtgcagaattcatccaccccctggagctgggatgttagaatgtgttccccaattcaatatgcttctatttaaaataaatacaatcttggcttcaaaatcatgggtcatggcactgctgtgtctggaggtaggaagcctcttcatcagggcagtttcaggccattcatcttgctagagtgtggataacacacatcaaaagcaaagttccacatattacatttattttaaatctataaagatggaaaatgattagaataaaggtgccagcctatagttagctgtttctagatattcttttgtcctcggcttagatgtaccacaggaggaattgttctttcttcttgctcccatttcttttcttggagttagtggggtaggtctcccactcgtgacacctgcttcatgcctttttgcaccacacagagatggtggtagtggccttggaggctgcagtctcttagctctcatgactgctaccacatttgtgttcagttgctcaggccgttcactgcacaaggacacctggcagaaggagcagtggggccagtgtacctcctggtggaaggctgcatctgcctggaggaaggggtgtctttttaatgcaggcagaggcctgtccagccagcggcagccctggctccctcgtcctcccgggagtaccatggcactgcactcaggggcttctgaggctgctgtgctgactaggaagtctgagacccccagtgatgcacaagaaactggggctgggtggtctgtcagccgacttcgggggagctgtgttcaggagagaagggcttgggaaagctgtgctctattccatgctggataaaaggagcagagataacccggtcagggtcatgggtagaggccatggagacaaacaagacagaggagatgagctgcagccgcctctagctggaaacgcagtgcagaggcgcccaggccaaagcagcttctgttcacaaaaagtctccccgaggccctgcaaggaggagcaggagccagtgctcccctctccccgctgggaggaagtgcctgcctgctacccaggcaggggaggggcttgctggcattttcccaggagcaaatgcagcacagaatgggggttccttaggccccagtcaatgaattccaccaggaatgcggtgagacctcaggggcagaggcccacagaggacatcaggcatccgagagacggacacacgggggaaaagggcatttccaggccctctgagcagtctctgcgcttgcatgacgttagatgatgaggaataaaaacccaaaccttatttcagcgctgcatggaaagaatttccctgagctgatatgaatgacataccttctgcttttaatgaggtccagtataaagacgatttatgtgaagaatattttggtcttaaaagactctgttattttggccaggtgtggtggctcatgcctgtaatcccagcactttgggaggccgaggtgggtggatcacggggtcaggagatcaagaccatcctggctaacacgatgaaaccccatctctactaaaaatacaaaaaattagccgggggtggtggcgggcgcctgtagttccagctacttgggaggctgaggcgggagaatggcgtgaacccgagaggcggggcttgcagtgagccaaggtcgtgccacggcactccagcctgggcaacagagtgagaccacgtctcaaaaaaaaaaaagactgttgttttaccaaggcccctttagtttaaagtgtataataaactcttcctttaatattagttggagtttgtctctccagtttaacctgaaaggttactgtgattgggcaaccatgaggcagtttccccagatgcttcttgatcaacagctgttctgttccaagggcctgctcctgactggttttgatcagctcttggatttttatttttattcattttttttgaaacagggtcttgatctgttgcctaggccggagtgcaatgatgccatcttggctcactgcaacctctgcctccagaattcaagtgattctcctgcctcagtctcctgagtagctggcatcacaggcgtgtgccaccatgtccagctaatttttgtatttttagtagagacggagtttcaccatgacggacaggacggtctcgaactcctggtctcaagtgatcccccgcctcagcctcccaaagtgttgggattacagatgtgagtccctgcgcccagccagttcttggatttttagtcgttctggtttatatttggttgactttgataaggctccttataaaagggcacgaccgataaaccaaagtgtctggattattacagaaaataaaattcaggtaagagccagatgttggctgataaagggagtgccaggaaccctctggctctgtagattgtgccagagcctcagggatcaccggccgagccggggctgcaccctgctgctcagtcttctcttgtcgccctgggagagggagatggtgggattgggccgggggttaggagacagtgccacaacaatgctcttcgaaatcaaacatgcgagaaagcaacgtttaattttgtttttcatttggcgtattcacatttccgtcttttgcttttggtccatgtttgctctcctttctgtgcttgtcacgggcatctggtcactcccggcctactgcattcctactctttctcatcccagttcaagcgtgttccccaggccagcctgccccttgcatctctgccaagacgttgtttctcacgcacctgggaaggtgtttcacatgcccgaacacgctgagggtcagatggaccccagggtctcagccggccgaccctaacttcccaggctgcatgtaaagccgttgtgcagagtcttttctggaagtagagcctcttctccactaagttattttttctttttaacttaggccttgcccacgagatacttgatagtcttccagcttttattttatctgtccactttgatcaactttgatcagcatcagcatgatttcaaagtctttgtcaagaaacagacgctggcgttggatgaggcatgggaaagatgaagagagttggctgagaaggacgtggtccccagccctgttcttgaggctgggtctttagggggccaggaggtgcggagctgaacgcttcccgcctgaggcttcatccgcccgcaagtgcatcaggactctgcttgcaaagcgacgatcatttcctgggttatcagtctggaagctgcatccacaaagaacaggaggctgttggtttttgctcatgcattcattccttcgttcatttggcattccttggagtgcagccagcagccacggggcgcaggtgcagtccgttctgggccacacctgagaagagctgcaatccttgcctcttgttggaggctttaggccccacctcgtgtcctcctgacctacctttctgcctcagccctgctctggcagccggcagtgcacaggtggggcctggcagccctgtgcctacgcagccccacgtatgtcctgcttcttgcctcgggtttccctactgcccctgcgtgggactggcgtcaccattctgggggacaggtagatcttgaaatgatgaaacattaattccctggggccaaccttgaccagtgagtgacaagagatggaggacaaaggacaaacacttgccacttgtatcttccttctcagaggcttctctgtgggtctccagggtccccagcaggaggcagcgaatcccagctgcccacagcctagtaatccagtgtgggttcccttcttccctgttttcctcctcccagcccggacctgttcctggaatcacttcccagaactcaccactaggccacaagctcttgttatttgaggaaggtagctaaggcagccacagggagctcacagtgtagggagatggagccaggcacccaggaaccatctcaacccacgtggtgagggccacgaggcatttcccagagcctgtggcacagaagaaagccagcccggtcccctggggcaggtcaggggaaggctgaactgggtcttgaagaggaagtgggggagggagggacactctagagcgcaggagcagtgagttcaaaggccaggaaatgtgaggaggccgggctccatggagactgggccctattcttctggtagatctgcccggatatccagcgtgtttgattggacctggttgagatgagtttggaactgaaggcatttcctggccaaagtgcaaagtgaccttggagagaattcagttttcctcagaggggatgaggaactcccaccctgggatcaagcgaggaagaactgccatcaagtttgtgtgtcctctacagcctcgctattccagtgtgtgggccaggacagcagcttccacaccacctgggagcgtgttggaaatgcagagtgtcaggccccgccctggacctgtggaaccaaaccctgcagtttcgtaagagcccagggttttgaatgcacattaaaatttgggaagtcctgtcctagggcactttgcagaagatgcttttgaccgggcttggggcagggcagcagagttctgtaagggaaagggtcttcgatgagagaggagaggagggactcaaagcacctgctgggaactggggagggtaaggcagggggaggagccagaagacgctgccaggtctcatccatgggtgaggggtgacaagcttcatggaaatgcagggtggggggaaaaggggagggggcgatgggctctgcctggggctgccccatctaaggtgtccatggagataggaaaccagagacgttcaccgggagtgattttagtgaatccttgcttcccttgagtcttcactgttttccaaatctttacaaaccatctgcttaatgattaggtctagaatgttcttagagatcactgtcaacattaccagactgaaatttctggagtcatcttgtagacagttgggatatttatgttttcccctttcatttgcaacttatattaaggtccctgcatggggccccagtaaatagcacccatcttcctcacttgggtgctggagatgttagatattggataagttgaataagctgagtgaagtaatgagtacccagggagcaaactgtcacgatttgtcctgtgaaggtaagttgaggatgcagcctgagatctcctggtcaagttgggttgtgaatcgggtagatctaggcacccaagcactggcagggctgatggggccgacgggctttctgcaggcagcagattcctaaccatgcccatcaaatattcttccagaactcctcctaggagcagggtagcctggggtcactggaggccaggagatgggtgattagagcccctgtcccaaggagacgtggggttgggggatgcttttccgctactcacctgacttctagatgaaggtcgggtgtgtggtgggaaagttcgccacacctgcaagctctggcagcatttcatgcaggtccacctgggcccaaaggcctggccctagcagcatctgaaggcatcccggttctctagtctctgccccactctggtccctgcagactgattttaccttgtgcaccgctgtctttagtgaggagattatgagcaaagtcagaatagaggatggaagccctgagctccaaggacggctgtccccaagctcctgaccctgaggagacacatgtgctgcgtgctgggcactggatagtcctggtcgtctccagctggtcctaggatcttggacaagtctccatcatcctggagccctgcagggccctcctgaggcaatgggggcccagctgcccttgggactcctccagccgccgctctccagggtcctgtcctctgcttctctcaggccagtgtgggcagcacctgccaagccctgctgctctcggccacctcccggctaggaacatgtgcttgggcctccacctgttgatttttgaaaaattattatttttattattttctattttcttttttttttttctgagacggagtctcactctgtcgcccaggttggagtgcagtaccacgatctcagctcactgcaacctccgcttcccgggttcacgccattctcctgcctcagcctcggagtagctgggattacaggcgcctgccaccatgcctggctaattctttgtatttttagtagagatggggtttcactgtgttagccaggatggtctccatctcctgacctcgtgatccacccacctcggcctcccaaagtgctgggatgacaggcgtgagccaccgcgcccagccgtaaaattattatttttttaaagcagtttgtgaaatccctgaaaagtcaactttctcatctgaagaaacacagtgaatgttatggaactcctcaccatctgatgaggccatttggaacttgatcagtgtttttcaaatttgcctaaccaagaataaccaaggtgttggttaaaaatgcagcccccaggctctccggggggaggacaatgaatcgtttaacacggctgctcagtgtgggcctgcttccagcagcctgggcttggcctgggcacttgttagaaatgcagactcctgggccccggccaggcctgagaaagcacaactgccccgtagcaagctccccggggggttccggccacttggaagtttaagaacaggccttgattgatcagcggttctcaatcttggctgtatattaaaatttattggaaacatccaaagagttaacaaaattttctcatgtttggggcttaccctgagaaattctggttggtccgcaatgaggctgggcacacaaataccctatatttacttgtaaggtattttattttagtataatatatgtaaagaaacgggcgtatatcatgtgttcagctcagtgagttctctccagtgggtcaaacctgtgtaaccagaacaggaatgggaaggtgaccagcacccaggacccctatactgcctccagtcgagacccctggcacccaccaaagataaccatgtattgactccttacggcatatgtgtttctgcctgtttttgttccttacacaacagaatcatgcagcaaacactcttctgtgtctgtcttttgctcactaggtgtgggacacagcatgtggcttatccacactccctgcccagcagaagtcattgtgtgaacacacctgtctatccctctgtactgctgttgatgggcactggatggttggcactgtggggctattatgaatacggcaacttgtgtctcgacagctcccctagggactttatgtagagccaggtttgccacgggatgccaccacacctgctggacaccgcctgtacctttgtggtaacctggggccctttcccgtcagctccaccttcagaggccaccgagttactgtggcagctactgcttcatctttgtgtcctgccacccaaggatgacaaatggccacatccagaagcccccgcattcttccaggatagcgggagccgcagggtatttaaagttctgcctcactttctttcagtcacactcaagggatttgaagaacactgccttacgcactggcccaagagtcgccaggcatctggccagggaacgggctgcagtgggataccctgcccaggctccctgctgccaggaagctgacgcttccaaacagagatgggtgaggggagtgaggtacctgtctgggtgtaaaatggaagaggatgccggaaactcagtaatcaagataaatattttaatgtaatattagaaaaaatcaaaattaatgcaaaacttccattatgaacaaaaaaccccatcattttaactaaagaccagtgctgagctgagccacactggatcataggcaaaaggaaagatgtgcacccctatacgtatgttttatattttgaatggttttgttttattctagaacattaaagaagttgaaaaatcttgaaaaacagaaaagtaggtaacattatcataacattgtttcaggtttaaatattttactaacactgtaaacaaatttattataattttgtttttctggctttaatggaaacaaactcatcaatagcattgtcaacatctacttctttgtgtgtctcattttcttttctttttttttttttttttttgagatgaggcctcattctgttgcccaggatggagtgcaatggcctgatctcgactcactgcaacctctgcttcctgggttcaagcggttctcctgtctcagcctcctgagtagctgggattaaagacgtgtgccaccacaccagactaatttttgtattttcagtagagacagggtttcgccatattggccaggctggtcttgaactcctgacttcaggtgatctacctgcctcggcctcccaaagtgctgggattacaggcgtgagataaaccaggccacgcttacctcattttcaattcagatagctgctatatttgataatttctcttgaccaactgatgatctcaaatcattttaagttcatatattattttcaatattaataacattaagtatgaagtatttcaatagcattaaaaattaaagtgtcacttgattaagagatattacaagtgacaatctctcattaacattaaatattatcaaatattaatattaaataatacaaaatatttacagttttactaacattaaaatgatttaacactgggaggctgaagcaagagggtcacttgaacccaagagttcaaggctgaaatgtagtaagactgcaccagtgactagccattgcactccagctcaggtgacatggcaagaccctgtctctaaaaacaaataaataaataaaataatttaaaatttatcacttcattgcctggggtcctattgcctggagaactattggtttacatattttatctgctgttttaattgttttaggtaggaaggcatatgctgtctttgttactctatcttggtcagagcagaaatcccccataactctgaacttttccttcatattttcgatcctgtcttggctcattctgtgtaattttttcctgatatatctgcttcttcattagttctctgcagtcatatgcaatctattctttaactcattcattgagattttttacttaaaacctcttttcttttttagaaattccatttgttcctttctcaaatctgcctgttcagtactgatagtgtccaattacttgtcatcttattgtttcatgtttcatttatttaaacgtttcataagtatctgctgtgtacctggcacatgacagtggtgatgtcagccgtctctgatggtctagttctgttgctggttgtttctgctgactctcattcaaggggttgcttgcctgctcatgtgttgagtgtgagcccttggctcgatctgctggaatcatgaaagtctaaatttgtggtgctttcacaaatacaattgttgttggattcactgcaaaccacaggtgtcacggacttgaaaccatgagttggggaaccccaagaccaaccctgggttcaatgattggctaggaggactcacaggacttggtagagagttgcactgatgggtgtgactgattacagtaaaaggacacaaggcaaaatcagcaaaggaaaaaaagggcatgaaatctgaaagaaaccaggagcaagcttccaagagccctctcatagtgaagtcacacaggatgcatttaattccttcaggaactacttgtggcaacatgaatgagacattgcccccagggaagctcgttagagacttggtgccagggtcgttactgggggctagtcatataggtgtcttctgcccaggacgcatcaacattccagactcttggaaggaaagcggctgttcagcatgaagtgtatggtttgtacacgtttaggcgcagtaagccactgggtttatcagggacagtgagaacctccccaaatccaagttcctagatgccaggcaagacctaaccttgcctcctctcccaggagagctgtggttactcttctctgtacaccttgtcagtccccacccaccttgcagggtcccgattcaatgtgggtgtcacaggctcaactcccctactttgtcagtgtgcccagacagtgacactaggagtgtccaccatcaggtcactgagctctgcctagctcaagagttttgttggcttcttggaggtaagttgaggaagggcttggaaaactccctactcttataagtctggcattcatcaaaaagtgtgttttgtcaagaatctgagtgcttctcagagcacctaattcatcctgtgtcagctataaaagccccttattttttagaggataaaaaaaatgtcaataagaattcatagtcacagttatccaggctaaaaaatacacatgaatgttgggaggttgtcatccactggacaacttttccaacagaaactttagaaccccaagtttccatttatctctattggaatctgtttctccctgctggctgcatgcctgcttcatttcttcctttaatcagggccaacttattcattaggcacaggagacaaagtgcttagagcccctggcacttttaaggaaccataaattttttttaatggaccacaatgttttagtttattttaaaatcagaaggaaaaaaatgagttgttaggggttgaagaaaagtttatttttaatacagcttggattatatttgcccttatatcaatgtagttgcaaaatatgactttgtatatattttgtggaggaagtgtgtccccaaagtgtctagggcccacaagagttatgatgcgaccctgccttcatggtattaaaaaaaaaaaaaaaaactaaaaccacttactggggacataatatgctcctagacctgtgtcctagcattggcaatggaaatatggttattccaaataacagaaataacagaatttccaaattgtataaattttaatatttttcctgagctctggtaactcttcaactataactctttggatcatcaagtaagtttccagcgaaagagctttagctcctcaattattggtagccttttcttagtgacaggctagagatttttccaaactattcactctgacaaatcaggaaaagctcccactcaatgtttctaaaataatatggctgtgtaggggctagacatgaagcctaacacttcttagaggaccaacagcagttgatgtaaatcattttatttaaagggctagtaagttattttgtacttaatgctttcacctaacaacaagtcagacagacatgttatttttataacatcaaacttatacattattcagtaatctatctttggtctttggttttgtgaacagaaactggctcttttgttccatgaactccacttggaaacccaactttcatgcccgtgaaaacctacttttaaataataatggggaccctcagaacaaaatctctgcttccttacacaccaatttctgtttcaagtggtagaaataaagtttgcatcctaacttcctgatgtctttatcacatgagagaaaagatctagtgtttctgccattttaactacatatcatcggtcaccaaaaacactgagaacccaaagcaatggctcttcctccagccatcaagctggacaccaccccagcctggttttgtagagtccatccttgccacccaggtcatctgaagacctggccaagggaaagggctaatggcagattatgacccattatcagcttataaaatccacatactggattgtgaccaaggtttttcactgtgaatgaataaaataggcagatttactgtgaagctgaagttccaggtgcctcagttgtcaggaaatttccaggtcataaatatctcactattttataatttgtaatattttatggctttgtaaaactgtgaccgtgcatataccaaacaggagagagatgcctgtctctttccatcctgaccttctctcccataatttctttcatgatggttgctgctaaagtgaccataggctttttcagacctgactaaaggtgagttgaggaggagataaagttcatctgaatttagtgagatgtgtgtaattttttttttaagtttgagaaaatctctactgagttctttcataaataagctgcttagaatttgggagaattttccactggcaaacttctggcatagcatccccagacatacagggctaggtgctttaggacatattagctaacttatccatgacaaaataacaagttcatttccacttctgggcaagatgaaatcatagagccttgattttccatcttgcgtgaaatgactaaattccagacaaagcatatgagtgattttcaaaacactgaacataaggcaacaaagaacagtgatcaccgggagatgagaaagagatgggataaaccagcagtgttcctgagttgaggagatggagctgggagtccaggaagggaaaggcggctagggttctaagcatagtgtgctggaaaagggaaagcctgagagtgagcgagcgcgcgcgcgaatgaacaagaacgaactctggaggtctgcagagaggtcccttgactcttcaacatgtaaggaaacttcttgaagctggttaaaaaaaaaaagcaaacaaacaaaaaaactcaacaaaacacataagcattagaaggaacaatccctggagttcatacagtgcttgaagtaattcaagggcattgagtacagggggtgtacttgcctcagtaacggaacaaaattagcccgcatttaaattctgctctgatcccatttaataccatttaaaagcaaaacctggataaaatggtttccaagtaagttaattacatccccccaataaagctccagaatatttatagaaatacaaaaacaaccagcacccatggggtaaagttcacaatgtctgcaattcaacaaaacattaccagacatgccaagaggaaacaaaaaggtacccagaatgaggagaaaaatacatcaatttaaaacaaacctagaaatggagtagatgatagaattagtagtcaaggacattataaaggtgttctaactgtatcccatatggtaaagaagccggagaaaagatggaatgtgttaagtagatacatagaatatatacctaaaattcaaatcaaacttctagagatgaaaactacacatctgaaatgaaaaatacaccagatggcatcagtggcagattagacattgcagcaggttagtgaactagaagacataacaatagaaactatccaaaaggaaacacagagaaaaaagagaacaatgcaccagaacaatagtgatttctgagacaatttcaaatggcctaatataaggtcatgcatcctaatcaaattgcataaaactggtaataaagagaactttaaaaaagcagccagagtaaaaaagacatactgtatacagaggaacaaaggtaaggacagcaggatttctcactggaaataaagctagaaacagtgagcaacatattttaagcaccacaagaaaaaaaagctatctagaattccatgcccatcaaaaatagctttcaaggttggcaaaataaatattttttagatatacctgagctgaaagaacccagcatcagtagacctacactaaaagaaatgttaatgtcttttgagcagaagtaaaatgatatcacaggaaacttgaatctgcaggcaaaataatgagtaccagaaatggaaacttacataggtaactataaagactttttttaattaaatatctttaaaagacaattgaccatttaaagcaaaaataataacaatgtattttggagcttattacatatacaaaaataaaatggctggtttcagggctctggcagggaaagagggagatgagtctggaacatcttgttgtgccagaaattaagaaaaaaaaacctcaggctctttaagcatttttcttactttgctgagaggatatgtcaaagcttgcagcagcctggtctgaaactcctactaaatttaggataatttgaacatcaaaaaaataaaaaaggtggcaactgattagaaaccattgaacagaataggaatctatgaatccacaacacatacacatgtaaattagtaagttaatgggaattacagaacatttttttccttgcagtagaaagcccacaaataaatgaagagggaacgatggatgagaaaacctccatttggcaacaactgtaaaaataaattaattcaggcaaggaacatcaagagatgctaaaattagtgggtagaattgagatgaggagtagaattttacatagtctcaaaatatctccccacaaaatacttattaactacaaatgggggcaaacatagtggagacgttggcagaagtccaccttagtcaaaggattaaaatgaatgccatcagcaacagggcatacaggcatcagatgccatccataggttgaaatgaagagaatagagcttctgtatattttgaccccaaaacgcatagtgatggtccagtcatgaggaagcatgggacaaactccaagtaagaaacactctacaaaatgactggttcacagtcttccaaatgatcaaggccaaaaaagccagagagaataaggaatattccagactgcaggagactgggatacctgagaatggggaatgggagtaaaaagaaaaacaagtctgttaatggtttacaaataccaccacacacctgtacagtgcttcacacacaataagcactcagaattagttactattccttttcttaggtttactgatgagtttattaggcaactttccatacttgggtgtcctaagggggaccttggcagtgccaaggatgcacatggattgtcacacatccagaacaatcacagcagcacagagtgcccgggattcacaaagttccaggaacttgtcaatctaacaccagccattcaaacatttccattctcccttgggcttactgagaatcacatgaaattaaaatacactatggatctctgtgtaggtgaaatcaaaatctggagaccatttgcagagatcttcactaactttcctatattagctaaaaataaattggttgactgttgcctcagacaaaatttctttgctgtatttatcaaatacttaataggcaccttccctttgccaggtcctggaaacacaagaatagcccctatccctgggtccctcctagtctagcaggataaaccacacgcagatgaaacagaaagtaataagtcaaatgacaggccgatatcagggtgttatggggaacacttaggaggggcaactgccgtgggctggggtgaagagcacctggaaagggaccaggaagtattttctggaggaaatgatgccaaccacaagtgggatttaagacactgcacaaaaggcagacttgcattatcatgaggtggatgagctgaccaagggctctcctgtggaggacggggtctgatggccaatagcatgatacccaaattcatgctgcagcagggtttccccatgctgtatttgtaaagtgcctctatgacaatatggcaaatctcacacatacaccatgtatgaggaacacctgccactcaactttccaagttcatagaactcaagttcataagaactgagccaagattttgcctctggctggggaaaatattaaacactggggacatgattttgccaccacactatttactgtcttgagtatgtgccaaagattgagaggatgcaaaggagtgcagcaatcccaaacctcacaaagcctgttattgctaaaaaaaaaaaaaaaaaaaaaaagggaaacctaaaaacaataaaaagaaaataaaaccaccaccaataattggtgacgaattgaataacagggttaaagcagaaggtttatatatatatatataaaatttgttcctggtacagtgtgttccagacactttgggcagaggctcccgagaaaggctagtttaggatatcagcaaaggaaaacagaactgtcagaagccaagaagtacgagtccaagcaggtgagaatcagcactgatcaaaccactgtgggtctctgtaccttctaattctttattttccagtcagcttggtagcattaacttgattatctacagttcagctgttcacgttacagggagagctaataaaatttttaaaaatgatataccccggttttacagaaaaacctcattagaatgaaaaaaaaaagctatgacattaaattctttagattatcaaataaaactggtttatcaactgctatgcagaaatatcaatgcagggtacttaaaaatgttatttttctgcatttacccccctgccccatcaacttaaaaactaccagttcgaatagtaaaggaaatggcagatgagcaaagatggttgcctatctggttttaatcatcgtatttgcgatgcccaaataactaaagctttaatacaaccttaattctataagcaacctggaacgggggaaaattaaatctctcacagctattcacattacccaaataggaagattttaactttactttcacaaatgtaaatgctacacccggttactatcaaagtacagggcataccattgagactgactcgaagcaaaatacagtacaaatttattgactccaatcattcttagtcaacatttaagcaaactgtagacaatggaattgaatacaaataagcaatggattaacattagatagaaatcctattttaccatgaattttcagttcgaaaaagcttattcctaagtaaaatggaaaaatgacttactctgctaaggcatatgacaaaatacacagaattataaaaccattcgtttttcttttaaccataagcatatattcaatggaaaacttgaaatagccttggactaatgttctgaaaactagtattaactgagtataactgtgtgaaaaatctggacagcattaacaaatgaaagagcactgaattctgttattttaaagatttacagtaaaatactttggttcccaaaagactgtctctaaaaggaatttttaaaaacacctgacattgtaactcattttttctcctccagaatctaaacaccaattttgtcttctccccagtcacatgggaatgccacaagctggagtacccgctgagatacactgaaagagcatattaaaaattacaaaaaattaaacttcttaaagtgctaaaaccacaaaaagccataaatgaaaacctattttttaaaacttaaagtttagtagtcagtgttaaagaacacttttaaagagtacgtgtcagcattatttaaatcaataatgcatttcacaattattgcagaaacatcactgagacatcgtaaattgtcaaactgacttgtaatccagttagatacaatttatacagaaatctatttggaattatacctaattactttttactaagaaacttcaaataattttacttcctgaagttccagattacagttgtatacacacatgcatgcatgtgtgtacaaacccaatttgagacaacaaaggccaactttagatctgttaattcttccatctctccctcaccctgatcagagagttggccttgtaggtgcatccacaccgcacctccgtgaacagacacattttattcctgtttcacagcagctactctcattagcaccaatgggactacatatggattcaaacggtcactcattaagtgctggggcacatttttacaggcaaggctataaacgttccattccaaaccagaaaaccaagaacatcacacatctccccacaaatgcaaagaacatcactgttgaattgttagttgtatattctggtaaaattataaatgcatactaactagttttaaaggtgaatattctacaaatcttcaaatattactgttaaaatgcacaatatttgttacctccattgcttactttgagtgataaaaacatgttttatgttactccttccttctcccacataaacgattcagtatcaagttctcagattaacaaagaatatattaaaacattttacattctttccacaactgcataaaaaagcaggcatcctgcatacttacatggaataaagagctttctacattttcaaaattaattacaatcctaaaatatatttacatgaatatcttcactagctaatgagttgcaacaatttaagaccaacttgttttacaccaagtatttgcctactggctgagataaacattcttaaaaaactttactgaataaagtaattaacatatctttcattattttacttcttaacatttaaaatagttacatgagtggaagcatattttttttgaccaccaaaataaactctttcagcctaatgcttttaaagtacagtataaaaagtaatagaaaaaccagaacggcattataaatgtttttggttcaaaattttatttgaaatcttatattccttgcttagacaaaaatgtgaagacaaaacaccagtcatttttaaaatctaacagatatgcagaacctatgtttagatcaaaaatattttttttttttactgattaacaatattatttttaaaaaatcttcgaaaatgtagcataaaggtttaggtcctgggatactgaatttataatgccaagatactctgtatcatggaattatcaccgatagatactctaatggccatgtaggtgatgattactcagggaaactgtcttcttttgaagtgacagctaccaagatggacagagtaagaaataccacattatacgcggaatgaattcaatgtacaataatccatcctgatgtttcatgtaaacccatatgctttagttttatccttaaaatgcatagatttctttaagaaaacaaagatggcaagaatcaataactgcaatttattttcccttctccatcaaatttaagaaagaataggaagttaactactaaaatattgtggaattttggagttttttcaagtgaaagaatacaaggcaaaatttcatatataatatccataatgtacaaagtcaatcagtattttataaaaatgtctggttcaataaaaaaaatgagaatatctttcctaccactggtatggaatgttggcaataagattgatgggtacagagttattttctgctagagcacaaatctaaaattatttcttaatgacagtagttggcttttaaaaaaaatttgaaagaatacctcgtaacacaaactagagtctaaattggtattactttcttaaaaggattttgtagtttcgtttttttaatacatctaactcccacccccacaagtaaaagttttcccttttgaaacacattgaactttggatatcctactgaaaggctttcaattacaaattatacatagtattctttgaaaagcccaaaacccatggagcaaaataagtagctaaaactaattttggaccactgatagtgctctaatacctatttttgaaatattaagcaatgatgtagagaatggccttgcccatgattttaaccatcagacccccaacaaattctaacagaaattgtcacaagagagaggcaggaaaatgtatatgtcgtatatattgttcttggaaagcatgttgaaactgcagtgaggtgtttctcctctgctctatctggaagtaaatggtaatttagaattttacatcagctgtgctaattcttgagtgtctgggatctatgtaaatatatgtcccgaccttatttgttacactaatgttaaaatcaaaattagtgccatatggttagctttgttttttgtcctaactacactcagattttcaatttgtgacagcataaatcagaggaaatgaaatatgtgcagtccttcaaatgctggtctgaatttagactgtggtgcagtgtacatgtaacatggtacaagtttttataacaatgtctatcactactgaagcccttataaactgactgtaggggacttccataaattgttttcatttcccaggtcttccttagagtttaactatcatttattatattgactgagagcaagtttttgttagtttataaaaatctaagtgttactattgctgatttaaatttctcacaattttcatacaaaaagaagttttacatgaccacaaaataccaaatatttatttttatcaagtgtcaggataacttattaaagttgagatttatcttttattgctaaagtagtctaagatataaatcaatactgcaaactactccacttcttcctattttggacttaagaacatggttaagatttaactagaactcaagtgtctaaaataattaaaagaaggaatacttcgacagtattccactaatcaataaaaaaccaaaaacctcaattaaatgattatactgacaccatggaatgaggaaccatgcacacaatcaagactaatccaatttcaacattaatgaaatcaaaccatcttgttcttgtaaggtccagaaccacaatattttaaaagctgtatttctaaagttaaggacattactaagtaattatcaatttgcctccaacttaatttcaagcgtaacaatctccaacctttattattcttgtttaaaaaatattttgtttcttatgacacatttcacaattcaggttgaaatctggggactgcctcccataggtaaaaagtgttggtctttcaattgtgtgtttgttcgtgactccaaagactaaatgcagtcttgaatgtcctgtggcaaagtttacacataaactgtcttttaaatgtgattgctgaaaggggtggggcatggtaaaaaagggtgtctgattcttggggcacaaacagtttttctgtggctggagttgggttttcggacaggcctgtggggctgtcaggctccagaggctggatcttgggcagtggtggtggcggtggcagaggtggtggagagggagagtttgtgggaacagggcacacctcagattccttatgtgccgattcctctgaagcctgagacatgtgcgattggaagtgactccagagtcgaaaattagtgcgaaaagctttgttgcacacgtgacaaataaatggtttcacagagcacagaagctcctggtgacgctccagctgcttatgcaccgtgaacatcttcccacacttctcgcagggccacaggctggcttctttgctaggacccgcttctttgggggctgtgctggcctcgggtgcctcttcttcagcctcctccacaggctcctctttgacttggattttcagttgcttggaaagactaaggtcttcgggaagacaagaggaatcttccgagtcgaagttaacttgttctgaagaatcactgaacacgttgtcgtcttttgtggtgacgatgtggtttactttgttgggctcaggctgggattggggccttgaagaaccagtcacatcaccattgtggtccaaaacgggcaaagaaaagttttcggtgggtgccatgttgttctgattatggacttcaacctggtgccgccagatgctgaaagaggacttgaaggtgcgcatgcactcgaggcaggtcagcttcttatactcacacttgctctcgtgttcttgcttcagctcgggcgagaaaaacctgaggctgcagtaagggcagacggccgcgttccggcacagccgctcgtggcttccttgctctaggagagaagagagcttagcattacagaggcggcactggtaaacctccttgttttctactggacttgcaagaggagcatgctcttttggtttagcaactttatttactccaaggggtttttctcctggatgcatttttatatgctgcttaaattgagagagaaagcggtacgcttttccgcagtaagtacaaatgtaagctcctttggctcgagatctcaagttcctcttgatgacttgctgtgcttgggagctactctgtccctgaaaaccaggcttgccgcgccttaacttaatgatcagggccttcttaatttctctctctctcactatgtcaatcagctttctttggaatttttcatccaaaacagcatgtgaactagaggctggtgatgggttcttcactatgccgtgttgggtctgacagtgtgtccacactttgaagttggtgtgaaacctcttgtgacagatgtcacaagcgtagggcttttctgggttatggtacatgttaacatgacggtgaagacctgctgttgatctaaagatcttaaggcaatgtttgcatttaaattttttgtttggtctcgtcccctccaactcaccaaattcgtctttattcaaatcagaatctggaaaatctgcatcaaggagagtagggcttgagccttcctcaaaattatcttctgacacaggagacccgtgctcattcacctttaacttcttaaacggcaatcttcggtccgcttggaacctcctttttgctgggagtctgctcatgtctttttggtcatcttctgttttcagagacaggtctcttgtgaccgacgaagatgaggcagctgctgttgttgccgcatctcccacagtgacgcggatgatgtccgaggggtccgacagcgggctgctgggctcagtctttatgcgcacctcagtcacaggggaagctccctccctgtctgttgactgagaagcactaaaggacctgaggcgatgcggttgtagcacttgaggcctgtcatctagggctgttttttcactacaatcttttaaagatgacttctgagataaagcacacaacacattccctggtgcatcactggacaccgaagatgatccctgggaagatttcaaatctatggaaggtgaatagacaggaacctggctatccatcgacaatgaccgtctgaggagactcttaacaagtgggccactcctgtcaatgctttggtttccagaaccagatccactggatgggatcactaagcctaactttgaatagtacaacaagtttctatcttcaccttgaccatttcctttgttagtttcttttaatagatagggagtctctgatgagctacaaacagacaaaacaggtggccgtggtctcttcaaagccagctctagagcttttccttttggaagctgaccactcacacctggtttatcatccatagcttctctgtcttgcagaggctttgaaggcaacactgcatttcttttcaccaaactgattctattaggatcatccaaagatccagaatgctcaagagactttgcatataccacagaactatctttcggccaactcttttcagttaatgacaaattatgaagtggttctattggttttgggacatgtggcttattggtattggccttgactgcaatgctaggagagggccgggaagtatggcttacatcgggttgattttgactaacagtttttccttgcgcttcgtttctactttgacaaacaatgacacttctcttttgagaactgttttcatcatcttctacaaacactttttttctattaggacacgttggaaagggggcttgaggtgttttagaaacgatgttagtcagaaaggaaatcccaagactatagccaagttcttgcacagcagcaaggctgctcttctcaacaaatagagaggaagaataaatgtagtttaaaacattatcaaaagcatctggctcacagaagtcaagctgaaatacagtttgtgactcattttccttatttgtgaataaactctgaaagtattcgctgctggcagccaagacgtttttatgagctcggaacttttggtctccaacaatcagcagcacatcacacagctgtcctttgagacgctcctcattcagggcacttaggagagaaatggcgtgtgcagggttgatgtaatgcagtaatccctccatggcttgagtttatctaaaagacaaaatgtaaaattactacagatattgcagtgaaaagttcccctggctcctcaagagcagggaacatcagctgtctttgcataggtaccaatatttagcagaccgtaggctaacagaagctctatgaatgaacaatcttatttaaataatggtgaaaatgtaaaataagtctcgtggtttaagtaggtcctcattaaaatagaagaattgcaggaactataatataggcatttgtatatcatcaaaaaggctgccagaacttggcaggtagatatggaagcaatatttgaaaataaaggtttattatttagggtccttatccatttgatgcttggcactattccttaccaattcagaaaacaagtacgaattatcaaacccctgaagtctataattctgaaagaaaatcagctttattactacatatacttaaacataatgtgaactgttaacaattggttgcaaagcaggtcttgtgagacccttgtttttattttgagacagggtatctctctgtcacccaggctggagtgcagtggcaccatgatggctcactgcagcctcaatctcctgggctcaagcaatcctcccactcagcctcctgagtagctgggaccacaagcacatgccaccttgccaggtgatgcggtttggtggtgtccccacccaaatctcctcttgaattgtaactcccacaattcccacgtcgtgggagggacccagtgggaggtaactgaatcatgggggtgggtctttctcgttctcttctcatgatagtaagcctcatgagatctgatgattttataaagaggagttcccctacacaagttctctcttccctgctgccatgtgagatgtgacttgctcctccttgccttccaccacgattaaaaggcctccccaaccacgtggaactgtgagtccactgaaccgctttttcttgtaagttacccagtcttgggtatgtctttattagaagtgtgaaaatggactaatacagtaaattgataccagtagagtggggcactgctgaaaagatacccgaaaatgtggaagcgactttggaactgggtaacaggcagaggctggaacagtttagaggactcagaagaagacaggaaaatgtgggaaactttggaactccctagagacttgctgaatggctttgaccataatgccaataatgatacagacaatgaaatccaggctgaggtagtctcagatggagatgaggaacttgttgggaactgaagcaaaggtgactcgttatgttttagcaaagagactggtggcatgttgcccctgccctagagatctatggaactttcaacttgagagagatgatttagggtatctggcagaaggaatttctaggcagcaaagcattcaagaggttctcaggtgctgttagaggcattaagttttataagggaagtagagaataaaagcttggagaagttgctgcctgacagtgcgatagaaaagaaaatcccattttctgagaagaaattcaaactggctgcaggaatttgcctaagtaaggaggagccgaatgttagtcacccagacaatggggaaaatgtctccaggacatgtcagacctttgcagcagccccttccatcacaggcccagaggtctaggaggaaaaaatggttttgtgggccaggcccagggccccctttctgtgtgcagcctaggaacttggtgccctgtgtcccaggtgctctagccatggctgaaaggggccaaggtacagcttgggccatggcttcagatggtgcaagctccaagccttggcggcttccatgtggtgttaagcctgcaggtgtgcagaagtaaagaactgaggtttgggaacctccgcctagatttcagaggatgtatgagaacacctgtatatccaggaagaagtctgctgcagggctgtgtcccctccatgaggggcagggccccatggagaaacttctgctagggcaatgcagaagggaaatgtggggttgaagcccccacatagagtccccactggggcactgcctagtggagatgtgagaagagggctaccatcttccagactccagaatggtagatacgtcgacagctggcactgcgtgcctgcaaaactcacagacactcaatgccagcccataaaagcagccaggagtgggggctataccctgcaaagccacaggggcagagctgcctaagaccatgggagcccacctcttatatcagcttgacctggatgtgagacatggagtcaagggagatcattttggagctttgagatttgactgtcctgctgaattctggacttgcaccggggcctgtaagcctctgttttggccaatttctcccatttggaacggctgtagttacccaatgcctgtacccccactgtatctgggaagtaactaacttgtttttgactttgcaggctcataggcggaagggatttgctttgtctcagaagagactttggtctgtggacttttgagttaatgctgaaattagttaagactttgggggactgttgggaacgcatgattggttttgaaatgtgaagacatgagatttgggaggggcccagggtggaatgatacagtttggctgtgtccccagcaaaatctcattttgaattgtagctctcacaattccccacatctgggaggcacccagtgggaagtaactggatcatgggggcaggtctttcttatgctcttcttgtgatagtgaataaatctcaggagagctgatggtttcataacgaggagttcccctgcacaagttctctcttccctgccaccatgtgagatgtgccctgcactccttgccttctgccataattacacagcctccccagtcacatggacctgtgagtccactgaacctctttttctttgttagttacccagtctcaggtatgtctttattagcattgtgaaaatggactaattacacctgggtaattttttttattttttatttttagaaatggggcctcactatgttgctcaggctggtctccaactcgtgggctcaagagatcctcctgcttcagcctccccaagtgttgggattacaggcatgaaccactgagcctggccaagagacctttaaaaatagaaaagaatttggaaagcaaaaaattatttgctaattactaatgaaagtgtttacgccaggcacggtggctcacgcttgtaatcccagcactttgggaggccaaagcgggcaggtcacttgaggtcaggagttcgagacaagcctggccaacatggtgaaattccatctctactaaaaatacaaaaattagccgagggtggtggcatgtgcctgtaatcccagctactcaggaggctgaagcatgacaatcacttaagcctgggaagtggaggttgtagtgagccaagattgcgccactgcactccagcctggttgacagagcaagacgttgtctcaaaaaaaaaaaaaacaaaaaaacaaaaaaacaaaaaaaagattagaagtgttgaagaataagtttgttttctttcttatgctatttgccttgcaatctcatgaatactattttcttaccaaatcacattttcaacaatagcacaaaggaaactttagcctagttctaaatttaattaaagagtttaaactgatatttcactgaaatgctcttcaaatctaaacatgagaagaggaggcctagtggtagagtgcaagctctggtgccagacacttgggttgagatgccagttccttgcaggctggctgattgtccttgggtgtttctgttagcctctcggtgtggcagatccctcacctgagttaggaatgacaactgtgccctcctcttgcagggttgttgcaaagagttcatctaaagaaaactcaacaaatgtgcacttaactttcagaaattgcaggattaataggcatctaattcagtatcaaagaaagtgggcagattaaccccaccatactctcgatgcagacaaagccatttcatgcagagacaatgcctgactctgtgtatttgaccctttatttaggcttctgttcctctaacacctcatccttttcattttttttttttttttctagacagggtctcgctctgttgcccaggctggagtgcaatgactcagtcttggctccctgcaacctctgcctcctgggttcaaacgattctcctgcctcagcctcctgagtagctgggattacaggcgtgcaccaccacgcccagctaatttttgtatttttatatagttggggtttcaccatattagccagactggtcccgaactcctgacctcacgtgatctgcctgcctcggcctcccaaagtgctgggattacaggtgtgagccaccacagctggctcatccctttcattttataatgccatattttctttcaaatattgttaagacatttatttttaagattacatgaatcccaagtaactatctgtgacggttttatctttctctagcgggcaaactgtagatgaaccaaacttgaccccagctcatttgtaggttctcttctggcctttgctggttaccccagccaccaggctcttcaggaagagcccagagtctcctaggctgtcaacctgggagtggccacacacggtatacaattccttctgactccctgataagatgcgactcaatttaaccgactgagacacaggactttgcttctagagatgatgcctttagcctgtccacaaacaactactttggtcagactgtaccaagtttctgtccactcccgcctaccatcctttcaaagtaaatggtaaattttaattcctctatttttttaaaaaattattctatttgtgactacttgataatttcccttcctttttcttctcttagtcatttaaattttccttaatcctactatactttctttacatctatttgtatgaagaaacccttaccatcttttacagagatcagcagaaaaagacataagcttataatgttacacgtattgactcagctgggtactgaggagtttttagcactaataatttttgacaaagctagttcagatgttgccacagggaaaagctgtaacacagaattaaaggtacagatttaaaggcttggatagtctttgtcaaaaggggttcttaaactcaacttggtggtttaaaactagcaattaaaaaataaatgactaggacagagtagaaaatatcagaatgcatcaaatgtcataaggctaattatgagcttgagaaacttttgtttctattatatatatgtacatacccacataagcaagcatggactggattgagatgtaaaatgtattccttcctgtgggtcagtcaaaatattttgagagccactgttctaggctaaccaacctctttgagcctcagtttacctcgccataaaataaggataatactagcagctaccacataatgctattgtgggaattaaataagataataatagtcgctaccatttatatagcacctaactgtacaggaacctacactacaaactataccagaaacttctcatgtcattcattcatcaaaatgggatcaaagaaggtgtgaaggaggcgagggatgagccatggagataaatggaggaagaacatcacaacaaagggagaagctaaggcaacaggagggatggagcagtgtgtgctgggagccatgtaagatgacatctgagaggcaataagaagtaagaccgtctagggctgggagacctccagaagaactttattttttactatggatgaaatggacagccattgaagattctgagcagaggaatgacaaagacctgaattacatttccaaaggattgctctggctctgttgttgagattagacaacagagggtaggttatgggggaagctgcgggccagcttgcagtccactgtaatgacccagatgagagaggatggtggctgggaccagggtggtagcaacggaggtaaaggcagagtcattagaatttctagtggacagactgcaggagaaaacagaaggtgtggagttaagtattctgccaaaataactggaagggcatccttaggagagatggggtttgacagaaaaaccaggagttcagattttttaaagaattcagttttgatatcctacacgtgagcagcaacctgttcatcaatgtaccctttatgagcctccatctccgccttactgtccctacttcctttcttgtgcttcctgggatcagttcccaaataaacgtctacctctgaatccttgtcttggggtctacttttgggggaatccaaactaagacacaaacagaactcgaagcacaggtaacggctaaccacttcacactaaaacctcccttccaagggcttgtcctggccctttagtgtgaagactaaaccaaggggagttttctacatccctggacctgaagcaaatggtattccacagaccgtatgcatcccgttgccaaaaaagcaacatttgtgtcccttttgtttagaaaggtttccttctttatgcattattcaaagtatcatgatccctatttctgctctaagtcactgcttcaaatttcttggatcacagacctctatcttctttggatgaaaacatctatggactaggggacaataataaagtcattcaaagttaagttgtaagagaaatactcactgtccctgaaaattattggggatttaaaacttaactttcctataacctccatttagagccatcacacctgcctgaaaagtgcctcaagatgtccaaattcctgatacacaagtgcagaataactttatagagtatttattttccattccattcagtagaacagtaactaggtacttaataacagctaaaatttgggtgtttattctgtcacatacacaaaaataaagaagttatttttatgtattaactcaatatttacatcaaccataggaggtaggtactattattatccccattttacagatgagaaaactgaggcacagacggtcaagtaacatgctcaacgtcatagagataagtagcagagcaggattcacatcagctggcttggatccagaggctaagctcttaacccctacacgacactgcctctagtttcctcttccaattctcgtatcatcttctgaactagacagtgtcatcaatcctttttacaaacaaatgagaaaactgaggcattgagaggtcaagtcatttgcctaaggtcacccagacaattatagacttatggctagcatctgtctagtgtgtgctagaacccttctagacatggaagatatcaatttaacaagtatggccctgcctcatggagcttaaggtcttgtgcaggaagagaacaggtcaattcatcagcctagtccagtatgctgagcagcagacaggatgtttgcagaggtagagacgcagtatagatgacaggcatcagagccaggtgagatggaggccaggaagggcgttctacgaagaaagttttatagggaatgctgggaagagataggaaggatgaaggacatttcgagggacgagtatttattttccattcctttcagtagaacagtaactaggtactcaataacagctataatttgggtgcttattctgccacacacacaaaagaaaacacttttaatgtattaactcaatattgacatcaaccctaggagttaggtactattattatctccattctacagatgagaaaaccgaggcacagagggttaagtaacatgctcaatgtcagacagataataagtagcagggcaagattcacatcagctggctgggctgcagtacatgcaacactacagagacaagacagagcaggaggaatccaagggaaccacaggtggctttgcctggtgaaaggtaaaggtacacataggggaggaaatgcccatgaggctggaggaagatggaggcatgagcgccctgggggctaaaatatgtcatctgaggatcttgcacaggaaagcaacattgtccattctccccagtaccccaggatctagagactctagatgtctagataggagacaggggtagctaggagatgcagatccctcaccttcacattaaggcccttgttttttttacattttaattcaattattaagttttgaaaacaatgtaccctttcctagtctggctgcagacagacaattaacatattgaatttttgtgttttaatgacagtcagtatatttgagtttaacaattacctaaaaatataaaatgctccatccatcaagaatgtaagtaaaaagggggaaaatcacaactgctgacgatcacgagataatccagcaagactgtttgtggctggtggctgtgtacaccgaatcctcaaaaacttttgatttctctgctcttctgctgtcagataaggcgagctttgttgccgggtgtactttctcctcagtgtatttttcagatctagaccgataagtttgctggcacatcactccaaatttccatgcaggttttcattatgagtaatcagggcctccgacttacagaagcagtgcatcttacacataaacacgcactgctgccaccaccgtctacgcccctcctttccacggctcatctccacctgactcatcacggcagaacttctgccacttcagtcatggtggaaaaaccttggagctcttaaaagaccagtgggtgaaatttggagaaaaggtctatttacgagcaacagaaaaaactaagaggaaaaccccccaggaaaaccagtttctaaaatagggccggcttgcttaccactttgatcctcgcacacaaatagcttcccaaagccttcctggattgtttctacttcatgtcttctgaaatttcaaaatgagagaatctttatggttaacaattcacagaagaccttacagttccatggaaaagcctttcgaatcagtctatttgtctcaaatcctggctccgccacctattaggcatggaaccttctaaagatgactcaacctttctgactagtttccttacctgttaaacatggctaacactacccaccacataggatttttatgaaggacagaagaggcaacatgtttgaaagccccagtacgttcagcacttcccatgtggcacatgcacatcttccttccttctccacttcccctcacagatgcttgcgtgggcctgctacccaccacacatcacaagaggtgctggtgatggggagatgagtaactggcctgcttcttgttctcctgtagctcacatttccatgttaggacagacaataattaacaaaggatgtgaagaatgctacgggaatactgattccaggaagcaattaatttggccagggtgtaggagggtggaagagtgaatagtgggaactattcactattaactatgagtgaatagtcctaaggaaggcttgggactcatcactcctttgacaattataatacaagctgaatatctctagtccaaaaacccaaaactactttctgagcaacgacatgatgcacaaaggaaaggctcattagagcattttggacttttggattagggacgctgaaccactgggtataatgagaatatttcaaaatcccaaacaatctgaaatctgaaacacttctggtcccaagcatttcagataagggatagtcaacctctaatactaaaggttccattctttacatttctactatagacgcttttcagaaatgctcatctggccttgctggggcttaaaaccttccaagggcttgccctggcctcaacttccaattccctggaatggctacaaaacccttcagaactggattccagaagattatttcataccatcacttcaaattcctcaggtaataaatgctaagggggtgggggactcatatctcacatcttttttttttttttttgaagagtctcactctgtcacccaggctggagtgcagtggcatgatcttggctcactgcaacctccgcctcctgggttcaagcaattctcctgtctcagcctcctgagtagctgggactacaggcgccagccaccaggactggctaatttttgtatttttagtagaaatggggtttcaccatattggtcaggccggtctcgaactcctgacctcaggcgatctgcccacctcggtctcccaaagtgctgggattacaggccagccacctgtaagatatgagccaccgcgcccggcctcatatcttaacataaattaattcaatgcaaatactttcctctttatagagtgttaaatcagttgtatggaattaagatttttgagggagagggaaggtaggcaatttcgaatatagagcattctagtgagaagcagaggaaagcaaagcgacttggcactcagaagggtaccagggggtgagtgagggggtgagaaacagagatggaaagggatcaaaataatctcacctacttggactagtgtcatagctaaggtacactataaattaagttggctcccagactagccacaaaactgctactaccagttctacaggaaaatggctctttacatccagcatcaacctagatttcaactctgggaacatgggtcctttggaatgttggggattgcttctatagtcctaaccatgatactagaaaaaagagggaatgcatgtaacacaaggcaaatacctagttaaaaaaacaaagcatctacatttgactttggaacataaacacacacacacagactgcttatccccaaaccctcatttcaggatttagccgtaacacctaccattggattttactatttgatggtgataggaagttgcctctgagtttcggtcttatcatcactcacttggtgacaacgcaaatatcctcagatttcaaacctagactagcttatccaatccttcaagaggagtcatgttactatcttgtattccatttcaccacactttcagtctctaacaagggggtttgattttggtttgatggttgttcttggccacattcaggagaatgatcctactccaacatagttcaagctcctttgcaccttagcagagcagactctggtcacagcctttgctgttttcttccagccactacacagccattccacctcctgttaacagccccatgattttgctatagaagaactgctcttgtcccactgtgtgctacagcctgatgtgctcctctcccctacctctgggctaaccatacaaccaaagccaaaccaatcagaaactttgtcctcggaatatgaatcctgagaagaatgacaaaggcaataaataaatgaagctgacttatctcaacggaggcctgaaaatgcaaccttgctagtgcctgctacatagattcctggagttagcttggtttttgtccttcttcctggcccagttttttagcttttcttttaagtccaagagcaaccctgtatctttacaataaactactttttccattcaagccagacagtttctgttcttgttattaaagaaccctaatatatttccacgtggtattcactgttccttgtcatgccttccaaacccatcctaatacagcttctagactgagcttcttagaacaaagctttgatcgctcacccaacatacacgttaaatattcctattattaattcaacttatttactgaattccaattctgtacaaggcatggttagatttatctgaaatataggggtgcaccaaacagacaagacccccactttctagtgagataaatcagatgctaaggaaacaaataaaaaagacaacctcagattctgctaaaagttatggtggaaataaataaggtgctatatcgctggatgcagtgcctagagaggatggtcagaaaataccttgatggaatatttcagctgagacctaagatctgaatgaagagaaccagctttgatcctgtttaaaaataaaataataaaaacaattgttctccattaggctaaaatttttaaaacaatgactaaaggtctctataaaatctggtttcaaatgacttttaaaattttcttagccaggtgtggtggctcatgcctgtaatcccagcactttgggaagccaaggcgggtggatcacctgaggtcaggagttcgagaccagcctggccaacatggtaataccctgtctctactaaaaatacgaaaattagccgggtgtggtgacgggcgcctgtaatcccagctactcgagaggctgaggcaggagaatcgcttgaacctgggaggtgaaggatgcagtgagctgagatcgtgccactacactccagtcaccactgggtgacagctgagccagagcgaaactccgtctcaaaaaaaaaaaaaaaatttttttttctttcccttagttattccctagtgatccctttctgctccagatactctgtctctaagacctaacctgcacatctgacttctcccactccccaatctggaaagtcctagaactcacctaaacccctcctcagcacactactcagaatattaatcacctttcaaagctcaggtcaagttccagctactccataaaatcttccattatgggttgaattgtgtccccactcttccctcccaaatttatatgataaagacttagcctccagtacctggagaatgtagtcatacttggagacatggtctctaagaggtaattaagttaaaatgagggctttagggtgacccctaaactgatgtaactggtgttcttacaggagaggaagattagcacagagacatgaacagaggaaggaccaagtagggacaagaagatgccatctataagccaaagagaagcctcagaagaagccaaccctgctgacaccttgttcttggacttctagctttcagaactgtgggaaaagaaatctgttgagtcatccagtctgcagtactttgttatagcagcccaagcaaatgaatataccttccttgactacttcatcttataacgtgcaaatacctcaacttcagcaccatttacatgtttattcactgcctttattgttagtcatttgtgtctccccaagaggactgaaagctatttaaagactgataatctatttaatatcttttggcattatcaatgctcaacatgttatcttccacaacaataaagatttgacttttctgtactcttcactccaattaaatgcacgagtgaaaattatggctgttagttgttttgctgaagtaaagcgtattacatcactgccctgctttggagtactgtactgatttttctattcctaaagaaaatccaaactacagactggcatacaagacttttcatactctggttacaattcatctctccacccttattggacactacttaccatctactctacaaacttgcatatccagcctctgccacccaaaatctctctcttccctctcctttacttggctaacttctttcgaaagatccagttgaaatgtcaccgactctacaaagcttttgtaatttgcccctagccagcagctcagtcatctaaactaccacaatacttcatctctctgtaataacaccacaacttcttcaattaatcttcttttacatgtgtctcccccaagggactccctaaagaaagaacccttgtttgcatgcacgtatccctgatgcccagcacaaggcctggcaagctaggtacagggcaaagagagaaatcatcaaacttgaggctcaagacctggactggctcacctttatttctccagcatccgttacagagccccaaaacgtggcagtattctttgctttttctattagaccttgtgactttaatcactactggacgatgattcccaaatctgtatctctgtttagactcttgaggctccagcctctcaggtacctactgaacggttccatcacagtatatcctcaggtccagcatggtacttaaactccacaactctcgtccctgctcccacatctgtttgtcctcacatattcccgatttactttggtgtgttgccagaccctaaaatttcttctctttcccttatagcctatcactgtgacctggtcaaacctagctcttacatagcttataatctgctctctctacttccattggctttgcggacaactaaaactgtcccttcggctgggcgcagtggctcatgcctgtaatcccagcactttgggagaccaagtggggtggatcacgaggtcaggagatctcaaggccatcctggtcaacaggatgaaaccccgtctctacaaaaaaaaaaaaaaaaaaaaaaaaaattagctgggcgatgtggcggaagcctgtaatcccggctactcaggaggctgaggcaggagaatcgcttgaaccagggaggcggaggttgcaaaaccagggaggcggaggttgcagtgagccaagatcacgccattgtactccagcctggggcaacaagagtgaaactctgtcaaaaaaaaaaaaaaaaaaaaaagaaaaaaagaaaagaaaagaaaaaattgtccctttaattatctcatttccatcgagagaccttcttaacttaaccccaattttgttatttacaatttttccttcagagtgtacacatctaatattcaacagtgtaagttcctcgagggcaggggttatatcttcttcaacttctatttcaacagaatgaagcacattatactttcaataaagtgttaaaaaggaaaaataaacaaaaagttacttttaagtaaaccagcacttcaaattttgactttctttttaacatcaatatttaggggtgcttaaatttaaacttaatgactactagtccttagagatcatcatttactccaagtacacgaggaaagctttaaaagataattttccatgagaaatctttctaaaatggattaacccactttcttgtcttcttaaacaaggtatgaggaccgtaatgtaagctgcttaattgaggactcagggtcatcgtgtgaacaatcgctggactattttgtaacacacgcgtgccctcggaggctcggtgccagggctgtgagcgcttgcacgaaaggaaaaaccccaggccgtgtgaagtctaactttccccgtcctctcggtcaggcaatcccaccggggcacctgtctaaaaacaccccgcctccgaacgcgcgctcttgcggaattctcccgaaccgcagagccctcgtggctgggaccgcatagcaaccgggggcagagtgcgagcccccagcggtgtgctgggatggaaaagcaggagccgctgaggatggactacggggcgtgttcccgaaaagccgggaagagatgtggcggggctgccgcgggcgtctctaaggccggcacgggtggcgtcttgactccctgcccctccagccgcggacctcggacggggggaagggggctcctccaagcggggagacggtcgccggccgagcagcagggctcctggccggcggagggtgctatgctctgcgggaccgccgggaagtcccagacaaggtctgcgggggctctggaggaaaaaaaacgcgctgtgaggtccaggcgtccgcgggaggggccgggggcggggagggagcgtccagcgggcaccgagcggtcacgctccggccaccgggccgaggacggggcggcggggctaggtcccggaccgtgaagggagcggcgggtcgcggcaggtgcggggtccccaaggccgccggccagcttccgcgcacaccccgcggcccgggccgccggcccccaacccctgcccggaacaggagaacgcgcccttctccacgaggcgtttcaaccgctccgcgcgaggggcgcgcgcctgggccaggcgtgtcccctaccccaggggcagctcggccagggtgaagagtgaagcccgtgagggaatggagcatgcgcattcgcgagggcgaggccaagtgctggcagggagcgtgcgcagtgtgaaggtacaatcggctacgtgggaacccgggacatgctcggtgagcgcccaggtcccgcgcacgcgcagaagcgctcggagcccgcaacccgctggtggagaaaaaagaggagagaaatcacctcagagttacgtcaggaaaggccgcgttttgcggggaggctgtagcctcccaaggagccccgcagttctcctagagctaggggcgtgacagttactcaccggtcttcagtctcgaggcagacgccgggcccctttccgctcacactcggctcgcgcgcgccgcagccgccgctgccgctgtgattccatccatcttgaatttgacgtcatcccacaccagggatgaggtcatcgcaggcatcgctcgtcacgtgcgcggcactctgattgggcgccgggcgccggagggcggggcggggggggggcctcgcggcgcagggggacgggggagggcgggcctgcccggagccgcgcgccgaacggacgctgccgcgctgcaagcccgcgctctcggtccatgaggggagcctgcggcggccgttaggggaggcggccgggctgggggccacggcgaggaggctgagcgccccggccgggtggagtccgtcgcggcgaggagcgcgccgattctcaggggactttgccgcctgccggaggcgcccttgctgcggggtcgccccgggtcattcggccgcggtcctgcccagctgggccgccagtagtccccgcttccggcgcggcgggatgcgtggcgcgagcgcttagtccctcggaggggaggacgcgctcccgttcaccggtggacggcgggcgactccccgagccgacgaccccgacagcgacgggagcgacgcgcggctttctgacgggcgcgggcggcgagcggggccctgcggtcctcgggtcggcggcagacgctcccggcccgcgaggaaagcccgcgggaggcggctcctgccgctcgctagtcgctcagagcgcttccatttcctcctcccgacgcaacctggccacctggcccctgggcggggacccggcggccgcggccagggcgtccgggctcgttcgccgcgcagatgggggtcggtcctgacccccgccggggcgtccacagcggcccgcaggcagccggagacttcgcatagtgcccggctcatcggagggctgtgatcttttttttttttgcagaaatattacaactccactgatgagaaaactcacttcgctttcagtcaaaaccagaaattagataacagaaatgccacactgtcaacaccgaccgggaggaaagcctcgctggcggagaccgctcaagggagccctccgcgcgttctcccagcccgggtcgcaggtggagggggagtgcctcctgcagggacggttctcccgcagacactcaaactccgggatgtaaaacccctgttaataattgtcaggggtctgttaattgccaaatacagtttttgaaagttgtatgcactaggtaaaataatttatgtaatgtttggaagtatgtgaaagacagacattagattgatacaaattaaaaatttgttgccaaattaacagctctgttgtagattattagtttgactaattttaagaggactcttagtcttacataaagaatcttgcacctaaaaattttctcctacaactttaaaacactttaaatttttttttttttttcctgagatggagtctctgtcagtcccaggctggagtgcagtggcatgatctcagctcactgcagcctccactccctggctcaagccatcctcccgtctcagcctcggcagtagctgggactataggtgcatccgtcacacctagctgatttttgtatttttggtagagatggagtttcaccatgttgctcaggctggtttcaaactcctggtctgaagcaatccacccgcctcagcctcccaatgtgcttggataacaggtgtgagccaccatgcccagcctaaagagtgtctgtattttgaactgtatggtggaaaagcacaaagtgactgttctgaaggtagaaggcaacagtgattataagtcttaaaagaaccttgagttttaggttcccctgtgattaggctgggggagtgtgtgctgttatcctagttttataggtgagaaaactagtactggctttaccgcatgctggaagcagcctcccttgagcgatccctttctagccacctgcttagctgtttttttgttttgttttgttttttgttttttcaaccttcctcaggacgatacacattggtgtctctgctttgagctatatgatcaggcttttggcctcaccatttcactggaattgacctgactgccaaatctggcagaaaccgttgcatctttcagttgctctctttgatttgtgacacgcttccaattgcttcagcagtgattgcttcagttacgcctcattccctggatttcccacctcttggctgactgctcctcctgggccggctgtgttggcccttctgcccctgcccatgctcgcactgggtttcttggcacacacaccctatgcagtctcatccatgcttggaacatatgcccagttgctggagccaggaatgtgggcaccatggtgggctcctccctcacttccagtattgggtctatccccaagtcctgtccgtccgacctcctcagtgtttctctggtaacgtaaccgcttaactgctctcccagcctccaggtttcctcctttaatccactctcacattacagccaaagcgatttttctaaacagcaaaagggatcatgccactcccttgcatagggtttaatggctctccattgcctaggtgagagttcaaaccacaacgcacaagtgcctgaggacttggcccagcctctcccatctttcccccacctccactctgacatgcaggcctctaaactagtcttgctctgtctcttgcctctgggcttctgggcttcaagtgtgttgtcccttctgcctgagctattgcccccaccactaccaccctgttttaatgggataatttcatcttgattggtgtttcttcctccaggattccaccacctccccaccccacctgactggcatcttctcagctgtatctagggttggtgctccctcctctgtgctcccataacacctggtgcaggttttgttgacaccacttgtgtaggtgatgttggatttgccagccagcaccctctcatccgccctgcaggtttcttgtttgcctctgcctgcccaatgcctgactttcagtctaaattccttacctctttcagcttctggtggctgccagcatttctgagcttgtggctgtatcactccaatctctgcctgtgtgttcacatggccttcttctgtctgtcaaatctccctctacttcttagtgttagccgtacactgaagcaccccaaacaggatctctcacaccatagacacatatgttcttttatacaaaatgcacattgtttatgcagccacctcattagacaccctgcggacaacccacagctgtgcacacagcaagctcacagctggacttcctatcgacattctatctgcccttgaaccattttttccatccttgactgtgtcctacttaattaaagatgctgctgtctgccttgctacccaagccagaaacttgacggttatttctcaatgtctgcattcaactgtcactaagtcctatcaatctacctcttaaatgccacttaaacctgtccttaccagccttatttcagctgtttctggcctgcagcagctctgtccaatctgtagccattgcaaccaagttcctgcctcagttttgcttccttcccttcccagcctagtgcgttttcaatcaaatttatctttccaaatgcaactcgggttaacttgcattggtgctgtatacccacccaccctcccatgtggcttgcagatgcctgcggcctcatagctgggcatggcctgtccagtgctgccaaggtggctttgctttctgcttgcctcgcctttgccaacccctctagccatgtagtctggcataggcacttcctgggatggccttttcctattcaatctgcaggcaaatccaatttcaagtgtcagaccgaggctgcctccctctgcgcttcagtgattccactataccatctatttcacctattcccatctgctcaaaggccggtttctccactagtttgcatgccccttggcacagagaccatgtctgttaacttgtgtatgcccggagctttggacctgttgctagggctgtgtcctgggccatctgttcccgatggctagagttttctctctgaaactgttacagtggtagccgattctccagtgttcatgctgttaagttggtttgcatttcttataacaaaaaaaaacacagcccttttataatttgggggagggaagtctctatggggtttaacatatctgcttcttcatatttggaagcgggaagttttaatcagctgtgattctcttaaccatcatttcattggaatgggtacctggctgtccagatttgcccaatctatgggttgggtggttatctctttaaaaaattcattagtttcctgtggctgctgtaatagctttctacaaacttggtgggttaaaacaatagaaacttactcttttacagttctggaggccagaagtccgaaattggtcttatgggatggaaattcaggtgtgagcaaggccacacttcccttggaggatatagagaaagtgccttgctttcagcctctggtggctgccagcattcctgggcttgtggctgcatcactctgatctctgcttctgtgttcacatgacctcttttctgtctgtcaaatctccctctacctgtttctttctttgttttgttttgttttgttttgtttttgttttagacacctggtcttgctctgttgcctaggctggagtatagtggtgcacttatagttcatgtaaccttgaacttctgggctcaagtgatcctccagcctcagcctcccaagtagctaggcctatgggtgtgcaccaccacacctggccttctctgcctctttcataaagggacacttgggaaggcatttagggcctaccaggagaatccagcatgatctccccatctcaagatcttttcatttaattacatctgcaagacccttttttcatataaggtaacattggaggtttcagagatcaggacttgatatctttaagggtcattagtcagcctactgcagataagaacagtattcctgtgtagcggcatgggaaggcctttgaaaagtatgtgaaacagaaaaagaaaaaagagaagagaatgggaagtggggaaagtgaggaaggtagtaacactttgggttgctgtgtaaatggtttccaacaaccaccttcacagtgaatatcactccgcgtgctcagaactggagtgccccgggccatagtgcctcttcagcatggttgaagttgggtgggattaagtgttgatcacactgggttctcataattgagaagccctatctgtaaacattatcataaacaaaaagtggtactaagcttaaggacctcccagccagaagcattagtgctggttttctccaaaggccgtaattgcctcttcctctctcttctcgccaccccatccttgttcttgaagagcagatgcctggaggatatccttccagttcagcatacaaacgccaccaataatacttggatggcattagatccacaccagtttctaagaaacccttttgtcttaagattgggagaggactgtgtgtgtgtgtgtgtaataacagtagtaattctatttgattataaactttgtatgaattaagaaaattcttatgtgctattccttaagttgctatcatgaaaggtaaggaagaccgttgcattcagatctgcaccatgggcatcctttggttaaaaaaaagatggattccacatccccaaagctgtgaagtggggtgaagagtgactgcttctgttgttacaattatctgctacatgtcctcaactgtgatcccatctgcaccgtgatcctgctttttaggaataattcccattttacacaccaggaaagggggctacccctttctaccctcaaggactgtaaaggtgactaccagatgatctctaacctcaaggaaatggcaccagctctgtctcctggaaatagacacaaactattgatacaagtgggaaatgcttggagacatgtatgctctcaaggttatgaggcacagaggaggggagactcttctgcctctgccagggacccagatgcagctggcctgagcctggagatggtggtgccaggccttggtcctctcagtgcatcgagctccctgggccggggcctgacgaggacgagtgctgaagtccatcagttacccccttccatgcagtggccacaaaaaaagcgggggcagctttgccccagacagaggctttgctgattcctggacaggcctgagggggctgacagtggctgctctgggttcacagcctgggacatcagactgtgggcgagaatggtgaactcaccagaaggcattcgtctacgtggccttttccaaacggaagcacggatggtgcatctgcaaggcgaatggtggtgtttctttcccacgatgttctgagcagccaaggccgtttgttcagtttggatatcaagcttcacgagcccctgcacacataatgcatcagtggtgaaaagtactcactaaattatccgatccaaaagctattaaaaaacaacaacaacgcatagctggtttttgtttgtttttgcttttaaatcttggagattttagagctttactccttttgttaagagtcagccttgttgactcatgaatcacctgattgagaaagacgtgaatgtgcgtttagatttgatttaaaaagcgtttgctgtacttttttatttccaaaatctatttttttatatttggcatgcttatattataactttgatacatttaaatatcttaataaatatataccctcaaatttgaattaaaacatccactttagaactagatttaataaaacattatagaacttatacttgaagtttgcttataaagcactctcacaaaaactgggtcaaatgatttaatctgttttctccattatagagcagcctttctccccgtcccccaacccctccttttaaatgtgactcaattgatttggtacactgtctgcttctctgatatctgtgaaattactatgtctaaaaatagaaactcagttctctttatgctttctttctgaggtaggccaattgttaatattgcagcactttaaaaattgttagctggtgaagaccaatgatcaagaaccacagtgatgtcatctgaggttttacgaagtttgcatatttaatttgttttacatattgttgactataataactctagaattttctttccttttttttttttttttttttccagacagggtcttactctgtcacccaggctggagggcagtggtgcgaacatggctcactgcagcctccaactcctgggtcaagcaatcctcctgcctcagtcccccaagtagctgggaccacaggcgtgcaccaccatgcctggctaatttttgtattttttgtagagacagggttttgtcatgttacccaggctgttcttgaattcctgagctcaagtgatcctcctgcctcggcctcccaaagtgccgggattacaggcatcggcaaccgtgctcagcctaagtctggaattttaaatgactcttggaaatattcccccaaattgtgctttataaaaatcaactaaatttgaaaaatgagatgactagggcacgtgataagggtggtaagggggaaaaatgtctgaacatccctatgaaatctgacttcctttttaactttagttctgtccttgcaatcagtggactggagtgattatttgatttcattacggtggcatggttatcaaggtagtattgttactagaccatattatcagcaatgtaatacttattctaaaattaagccctgtgttctttctcctgggcttgaagttagttcatcagaattctctgttaaaactgaaatccccatttctgcattcactgtcttttactggccagcacagtgactggcctatcctcgattcaggtacgaaaaccaacaaccaaagaaacaaccaggtaggcggccaccatgacaataaagctacagtaaaaaaacaccaattgttttatcaggtgtaagctacccttcagaataacattgctcagaggttttgaataggaccagatatgtgcaaaaatgtcaaaagaccataaacacgcaaaaattacgtcaaatatattataaaagacaaaatatcacagagcaaagttgaactactgcaaagaactttgaaactgaaatgccttcaggcccgagaatcgacgttaattgtattggaagtgaagaagcttcagttgacgcacgtcacaggatctgaacgggaggtttccagtgtcgtccccactgtggaactgcgatgtgttgtcactgtagccccttggagcacaggcccagcagcacgtgactgaaggcaatcagcaatactgagacgaatcgctactccgaggcttcactgagttaaccccaatgatactcgctcagttaacaacctcaaaatcatttttggtcatggaaatcattactgaattatagtgaggatccaaaacttgaccatagagttataataatggaggggggatggagattctttgataatcaggaaattctaaattatctttcagagttttctaatatgttgatgactcagaagattttacatgcaaaaactagaactctgtggaaggattttacagtgcagaagacagaccttaccgttgcccttctctgatcctccagttgggcaaggcagttaccactaggcaatactagaaggcagtaacaccctaggagtgtagcattgtcctatctccagggcaggtgggctggagaattgcagcccatccttctaggccacgggcaagtgttactgccttgtagttccctctctgatcccttcaactggagcagcacccaccaacacctggggacccgggacacacctctcttaaagcactgggctggaatgttggcttatgagctgtctctacttgtagaccatgagctcctacgcaggtgtgcacctggccccgggtgagggctcctgtggtatttgcgggcggaatgggatttgcttttggggagagcagcagagactttctgtgcttctctctgggtcatctccctccccgtcagggcagtcatgatactgacatggctagcctcctgcccttaggtaggctgtgtgaccagtggtggctgctggattctgagaagtgacattggtcagctcctgattgttcatcacgtgatacctgtgtttgatgaacattcactgagcacgtgccaagtggcggctgcatgctatgctggctggcagggtgtagagacgcatggggctcaggccccaacccgagggagcacatcagcccaggggtgtgcaaacactttaaacacagtgtgctgtgtccccttcaaggcctatgtgtccctgtctccatctcacctcccgactgccagtcagtcttctggagtctccacgacttgtcagggtcaccagtagcctctgtgtgaccaaatcccggagtcatgtatttgtcttcactcattcaatcattcatggtgctgcactcccgacacacactgtgtgcatggttccatcccttaggatacttcagtaagcagaacagaaattcctgccctcatggagtctccgtgcttgtggacatccacaggtgttgagcccagagcagtccctcatttacctcctgcaggaagcgcctgctccgggggcacccagccccggaccatctctgctgtccctttcaccacctctagctgcactgttctctgccttccctcctgcccaggggccttgtgtgggctcttttctccacctgggatatccttcctctttgttcttcttgtgtctccttctttcattcagttcttcccatcctgatcctgaatttgactcattgtagctcttaccaatatctgctgtgttcttgtgtctttgtttactgtcagttaccccacccaaatatcagttccacggtgtattcctggcacctaggatagggcctggacatggcaggtgctcagtgaatacttgaaagaatgggcatcgggaagggagttctagatagaaggcctggcatggggctcagaggacactctggacctgagggtttggggcccagctagagccctggtgtgagggctgaggatggacaggtgggggcctctgtgcacatgtgtccaggtatggactccccttgggtaacaagaacacagggtggggtttcaaaatcaggagagacatgttcaggttttgagccttccacaagccttctccttgtggaagttcaaaggagaggaagagattagaagtggggtcggaggtgggggtcttctgcaatgctggcaaggaggaattaaacagcctgaacaagacagtggtgatggtatggacaccagcatccagggcaggcctgtggctcatcggatttgagaggagcctgcgacaatgacggtttgaggctgggggaccaggtataaccagagccctaccctcagagagacgcttcctcactccccactttccttcttcatgccctgtgcctgccccggagctctacgcagaaccctgcccccagccccaacacgcctgcccattgaacccctgccacagctgcattaatcaatcctgggtgtttatccaaaagaattgcaatcaggctctccaggagatgtctgcactcccacgttcattcacaacagctaagatgtggagtcagccccaatgtccatcgacatgtgaacgaatggaaagcgtggtgcgtacagccagtgaaatactattcagccttaacgaagacaattccgcaatacacaacaacacgatgagtgacacaggccagtcacagtgggacaaatcctgcaggattccacttatatgaggtggctaaagtagtggaactcatagaaccaaagagtgggaaggtggctgctaggagctcacggaggggaaatgagggttgctgctcaacaggcattaagttttaattaagccaaatgaatgagctctagagctccgctgcaggacatcacacccatagtcgcgatgctgcggtggacacttagcattttagcaggacagatctcatgtgttcttaccacaataaaaataaaataaaattctggaattaacatcaccaaacaggcacgatgggatttgattatattgcaacgtatgctaagaaggggttattcatctggtgacagtggcatacatcctgccacggtctcctctggcagctgcccagagcacacagcagtccaggagatgcgctttgaatgctgtacccagcacttcatgggaaatgtgactttttaaaatggagggtgaatacgcgaagtcacaagtgtccctggaaatcagggatgtgtggctgttcacatgtcactactggggagcgtactgtgtctggggagggcctttgtttgagacaagacgtggactgaggacaagagagccaagccaagtcctgcaaaagaggaacaacagggcagggaccgggtgaccaggtggcgatggaacgtagagcccggactttgctgggcagtgggcaaagggcaggagtcaggctctggaagcctgggattccgagctcctccagggtctttagcccctggggtgaaggggacagggcacagagccgtgcgaagccccacactggcattcacctcaggctgatgacagtggcagtgcgcaggggcgctgcaggaggccggggaaggcgaggtcacaacaggcacaatagggagtcgttgccaggcaacctctctaggcttctgttgtgattctgctttagttgggtctgggggggtctctctggagagtggctataaatgctagcctttgtgctgggcagcaaagcaaatcatcgggaataacccgggagcctggcagggaaaccgctgcactatggagaggacgcttccagatacagaggacaaatcaagtgaagggacggaacaggtcacacccagagcggcacagaggtgtgtgagctgttcccacggtagtcagagcctctgttccaactgtcctcccgctgggctctctccggtccccagtgcatgggctggagtgtggcccctggcagagccctggaggccggctctgcttcctgcccccttccagcctggagcagcccgagggcgcagcattcctggggcaggcctgagccctgtggtgggctgagttgagtccccagaaaggtagattgaagcccaaactctctgtatgtttgaacgtgaccttatttggaaaaagagtctttgcagatgtgttcaggttcagatgaggtcatcctggattagggtgagtcctaaatccaatgctgtgaccttataattgggggatgcacagggagaggccgcatgaagatgcaggccaagactggggcactgctgctccaagccaaggagcaccaaggactgaagacgcccgcggggcgctgggcaaggtgcagagggattcttcctgggggcttcagaggagggtggtcctgcccacacctcacttttggacttctactctccggaactttgaaagaacacatttctgtggttttcagccacctggtttgtgggaatttgttatggcagccccagaaaacgaatacaggcaacatcacttagtgcttaagaaagagcctgtgcccgggcgcggaggctcacgcctagaatcccagcactttagaggctgaggcaggaggatcgcttgagcccaggaatttgagaccagcctgggcaacaaagtaagatcctgtctctacaaaaaataaaaaaaattagctgggcgtggtgatgcgcgcctgtgtttccagctacatgagaggcagaggcgggaggatcgcttgagcccaggaagtcaaggctgcagtgaaccatgttggcaccactgcactccagcttgggtgacagagtgagaccctgaaaaaaaaaaaagtctgtgggcccacgtctcacatcctgaccccgccggcgatcaactgtgtgaccttgagtgagttacttaaactctctgtgcctcggtctccccatgggttgtggaagggttgagttgatgagtgtaaagtatgcagacaacagccaggtgcccagcatgatgtaaacaccgcaagagcactggctgttgtgaaaggtgccgtgtttaagaattggagtttcccaacgggttcagtattagtacctgttctttagggcacagacttgttctgtgccattttacctgtatccatttcaaccagacttacatcttttcgaaggaaggcctgagaaaatctcaattctcaactggagtgatgattcaaaccccttgtttcccttccttttctttggggtctctgttagtttcctgtggccaatgtaattaattaccacaagcagggagcttaaacatcagaatgcatctttcacaatctggagaccagaaatccaggtgcaggattttacagggccatgctgcctctgaaggcaccagggtagggtccctcctcgcctctcccagtttgctggcatgccggcaaggctcggcactccttggcaggcaccagccgtgctccaatcactgcctgtctttgcatggtcatcttcttgtgtttctctgtatctctcctcgtataaggtccttggtcattggattcaggacccaccttactccagcatgacttcatcatcacttaattacatctgcaagaaccctgtttccaaataaggtgacattcttaggtactgggggtgagtatgtatcttttcttcaacatatctttttggtggaatgcaattcaacccagaacaccacctctcacgaaaacggctaaaaacggctggggaggcattttcaagaactttcactaacaaattttaaagaatagatttcactgtaagccttgggcagccactgaagagtgtgttggaatagctgctgagtgtcggccactactgggtgacgtttccttaatggctggaagagtgaaggaattagggccgagcgtgtatgcacaaaaacttcttctgttttgactgtatgggcttcttcctttcatttgttcatttagcaaacatgtattgccttcttttgtcttctaggatctatgaaagataaaatgtggtgtgaggacacggcccagccccaccgtcgtcttccagccccaccatcgtcttccagccccaccgtcgtcttccagtcccaccgtcgtcttctagccccaccatcgtcgtcttggactctctgggtggcaccacgctgtgggtgctgctctcctctgtgtcccaaacgagtttgtgcctcactttgtcgggttttggctgtgacttggagcctcaccaagctcccttttcctctgtctcccattctcctctccaggccagggtggcttccccagccctcctccccgggtcctgcctgtgccgagccttcctcccaggagggaggtgatactgacttgagatcttatgggtgttttgtttgtggctgggcctggccgaccctctctccacggccttagatcacactctggatggataggacagtcgtcctcaatactgagcctctttggagcatacccactgatggtggttcacaagctacccacgcccacaggctgacccagatctccgtgaaattaaaaaatactgtgaaaggaaaaagagccaatgtcatgtggataatgaagtgtcagccactgaaaaatctcaaaataataaacatggcttgtttgtcagggttctctagagaaacagcagcaactgtgtgtgtgtgtgtgtgtgtgtgtgtgtgtgtgtgtgtgtgcgcgcagagagaaagaaggagggaggaagacataaggaatcagctcatgcaattgtgcagcctggcatgtccacagtctgtaggatgggccggcacgctggagacccaggaaagagctgcagtttgaataggaaggccatgggcgggagagttccttcctgttcaggggacctcagtctttctctagaagacctttggctgaccggatgaggctcatccacgctatggacacaaatcagctttactcaaagtctactgatttaaacgttaatctcatctacaaaaagtaccttcacaaaaacatctagaacaacgtttgaccaaatatctgggtactgtggcttagccaggttgatacatcaaattaaccgtcaccttttgcttaatctactttttaatttgcttttactttgaaaacaagtaaagtttttgtaagcctccaagttgagattaacgatgtgagaaggagaatccataaactttcctgttgaacaaatagcagatggattttttcaggaggtggggaccacacagggctggcctgctctgacgtggcagccgcagaggggtggcatcagcagcagacagtctcatgtcctcagccctgccgacgtccagatcactgtggagtgtagctattactcatgcctttttctttgatctttgcctttttccttattattttttttccttgctgaagataaaaataaaatggaagtaatgataaaaccacagttcataacctaaagtgccacaaggattaatgacaaattggtgccctggacatgttcgtcacacagccaatgtccccgctgtgccagatccattttgaacgtaagctggactgtctcaccctgacagagttttccagtcctcttcctcccaggttctcagtgtggccagtccagacatctgccttgcaccactgcctcctggtgacccctcctcacgggacagctggacacaacctgcctgactcgccctcagaccccacaccccacatggactgtgcagacctatgccccagtgacccttcagtcacagtgtgaccccacggagctcttgcctgcttgctccagacccaccgattagaactcccgtggtaaacctgcttggctaactccttggtccccataaaggtgttggcccctgggtctccctatctttccccctgcccgatggttgagtgtgcatgtccccagtggctccccactcccgtcagccctgcgaggtgggctgccctctcctctcgcggccctgggagacatcagctgcttctgagctcatgagctctgcagcaccgcctcctgtgtctcagcccagctcgctcctggtcagggctagaatttacagccactctcaagagagacctcaggccaaattagaaaaaaattaatatttacaaaacagcatgtgtgtatgtgtgtgtggggtgtgtgtgtggagggctgtgtggtgtgtatgtgtgtacatgtgtatgtgtgtggggtgtggtgtgtatgtgtctgtggtgtggggtatgtgtgtggggtggaatgcgtatatgtgtatgtgtacatacatatacacgtttaaaggtcaagctgttctttaatcaaccagaaagcgtaggacacacatatttcttagttttttccaaactgagatagagaaaggaagatgtttttaagtatgtataaattcgtattcattttatgaagagagaaggaaaggcccgctctgccagtgccccattacagcccatacaccctgcaggtggctggggcatgagaagcgttgagttgcctctgggtgacagggggcctagagcccttgcatcttggctgtgtgtgtagtgtagggtgtgtggggtgcgcgtatgtgtggtgtgtgtatgtgtgtgtggcgtgtgtgtgtgttgtgtgtgtgctatatgtttgtgtgggaaatgggtgtgtgtgtgtagggtgtgtgtgtggtgtggagtgtgtatgtgtgtgtgggtatgtatgtgtgatgtgtgtatggtgtggggtgtgtgtggtgtagggtgtgtgtgtggtgtggggtgtgtgtgtgtggtgtgtgtgtagggtgtgtgtgtgttgtgtggtgtgtgtgtagggtgtgtatatatggtgtggggtgtgtgtggggtgtgtgtgtgtatgtgtggtgtgtgtgtggtgtgtgggtgtgtgtggtgtgtggtgcgttcatgtgtatgtgtggtgcatgtgtgtgaggtgtggtgtgtgtgggtgtgtgatgtggggtgtgtctgtggtgtgtgtgtgtgtggtgtgtgtggtgtgtgtgtggtgtgtgtgtagggtgtgtgtgttgtgtgggttgtgttgtgtggggtgtgtgtgcggtatatgtgtgtgtatgtgtggcatgtgtgtggttttatttgtgtgtgtggtgtgtgtgtgtggtgtggggtgtgtgtgtggtgtggagtgtgtggttgtggtgtgtgtgtagggtgtgtgtgttgtgtggggtgtgtgtgtgtggcatctgtgtggtttttttgtgtgtgtgatgtgtggtgtgtgtgtgtggtgtggggggtgtgtgtggtgtatttagggtgtgtgtgttgtgtggggtgtgttatgcggggggtgtggggttatatgtctgtgtatgtgtggcgtgtgtgtggttttgtgtgtgcgattatggtgtgtgcatgtgtgtttgtggtgtgtgtgtggtgtgatgtggcatatgttgtgtgttgtgtggtgtgtgtggggggggtgtgtcacacgtatattggaatctgaaccaggtgctgtttgtcatcactctgcctctgtactttgctgaagcagcccacatggacgatggggcccttcccagtgctgcagagtcttgagctaagagtttacgtattccaagacaacgcacatgggacatgggacttcctcccccgtgctcctcctgtcctccgcctccttgatgagctggacgtgcggggagaccccagacctggcgcatggctggttttgctctgtgcctgcacagaccggagatgcccttggtgacgccgtctgctcctcccgtgctttcagacacagtgagcgccctgtacccaagtgtgtgtcacgcaggggtgctggggtccctttcgtctctattccccattaaacatctttcaccattttaacatgcaggcatttagaaactcttttttcatataataattgtctgagctcagaaaagccagcagcgttactcactgtcaccgaagtccagatggtatttttattctgtgctcaaattggcttcctcatttctttccaggccctgtaagcagcttaaaatttccattttccaggtcaagctgttctttaatcaaccagaaagcgtaggacacacatatttcttagttttttccaaactgagatagagaaaggaagatgtttttaaatacgtataaattcatatttgttttatgaggagggaaggaaaggcccgctctgccagtgccccattacagcccatacaccctgcaggtggctggggcatgagaagcgttgggttgcctctgggtgacagggggcctagagcccttgcatcttggctgtgaccgtggccttcgatcgagcacagtgggtgagggccttctgaataagaagggcaccgccacaccctgtggggccgatgagcaagtcagttcctctaatacaaactctgcattccttgtggctccccaaaaaggtcagaggacttaggagatggagaggaaccaggaggtcttctagttcaacttgctcacttttcagatgcagagttcagttcaccgaggctggggcagcatcaggatcagaacccagaccctttgaccccagggctctttgcccgcagcatagggaggctggagagggccctctgcctgtccccagtcttgggaaagtccttctctgtgcggcggtgaaatactcaaagagaggtgaaggcggggcctctctgggaaggtgacctggggtaaggagcctgggttgcaagtctctgggagtcagtgggaccctgctgtgcccttggcttttcctctatggcccttctctagctcaggaactctactatgctgttcctggtgccacctgtcccagaggttgtgagccagtaccgtgttctctgccctcaaatatgacttccatctgtttcctcctcagtatttacaatgcagacagagattgcctgattctgtgttgccgcccttccactctaggctgcctgggtcagctgcgtgtctgtttctgtagatttggaggggcctcatcctgggctggctttgcataacgagaacaaacaagagctgtccaaactgctgtggaaccaactttcctttccttgagaggaagctggaattcaaggtgctgagtgaacctacttccagacaggtggtcctaaatgggaagtgttgcatggatctcagaaaatgacagtccctaaaataagtccatttgtttttccaaaatcaccaaaaacctgggagtggaacgcagtcacctttgagacacagcttgacagtgactgtggcctttgattgagcacagtgagggacagacttttgattaagaagggcaccaccacaccctacaaggctgatgggcaagtcagttcctctaaggcaaactctcctttccttgtggctcgaaaaaagccggaggactttggagatggagaagaaccaggaggtcttctaggtcaatttgctcacttttcagatgcagagcttagctcaccgaggctggggcagcatcaggatcagaactcagaccctttgaccccagacaggtagtcctgagattattataagctccgtttattacaacttctgggagccaatcatttgaagcagaaggtaatgtttcctgctctggtgaaatgaagactagttgaagaaacagtttgcagaaatattgaagtgtagctccattcagctctgtcttaaatagtgtttgtggcagcagtcaggccttgaggggtgttaagggctgaattgcatccaccccaaactcatatgttaaagtccgaacccccaatacctcctgatgtgactctatttggaggtagagtctttaagtgagtgaataaatcagattcactagtgtgggccctaattcaatctgactgtgcccttatcgaaagaggagatgaggacacagacactcacagagggacggccacgtaaggacacggagaagtcaccatctgcaagccaaggagagaggcctcctggggaaccaaccctgccgatgccttgatcttggacttccagcccccagaactgttatgaaataaatgtctgtcatttaaagccacccagtctgtggtatcttgttatggaagccctagtaaattgatgcaagggacaaggcagtcagaagtggcattcgacttccaattagaagtcttacaaatgctgtaggctccaagcccagggtcaaggtgggaggctgtgtgcactcgggaagtgctaaataaacgcctggtcactactgattggtccacacatggggccgtgggtgcagaaactgctgttgtttttagcaacaccctcatagacctaggaaacaatgccatcatcaccaactacaactctgcctctcttcacatgttaactttgtaaatagaggaagataactttgataatgatggcctataaggactttcttttgaacaggataaatctctgtggcagagatcactggttgccacccccacatccaccctccaccttcccttccttcttagcaacagaactctgctttatctggagtgtttaatgtgcccagctaaaagaccacttttcccagcctcttgttccttttggccctcatatgatgttctgccaaaaatatgtccacggaaatgtgctgtggggattctgggaagtcttcgtcaaggggaggggatatttctcttggatccctctgcttctttccctctgttgcctggaatatgtatgtcatagctggtgctccagcagccatattgttccttgagttgcctctgagaagggaagccacatgtggtagaacacaaaaccaggagcagcctgggagtctggtggcttccatattttccctgaaacacctgctttcacactcgttttatgtatgagaatgaaacctttctgtgtttaagccaccacagtaagagctttgctacatccagctgagcataatcctaacattttctgtggttcaagatgaatgaaggcatcttagtccaaagaggttaaaaaaagtacctgagtgtacatttggtgactagaaacgcctccctcttttctggccctgaagggatgtgagaacctctgggttacatgaatctggtgcactcagatacatggtgtgtccttcttgttcccagattgacgactctgctttctcttggtccgtgatggaagaggaagcccgaacgcacgcctctatcagcaactctgcagcaccgcacttgccactcggagaaaatgctttgaaagcccagacagccacataccattagaaacaggtaagagggctgcagctggcaaagacaatgcgtagctttttcctttcttttcacttgtgttttcttttcttggctttagcttgatcttaatccatgttagcatttccatgtgttttctctgtaaaaggagcgactttggagctttgcagattggaaaaataagtagggtgaaggaagggtgagacctgggtgagcccagacccgggggtccaggatccaggccctcagcatggactgcccatcccccaggcaggtacaagcccggggttggggattgggttcatggaagagaccctgaagacaccctggagaagcagctgtgtggtgcctggcagccacagtgcagagacaaactgcaggaaacaatggggaacctggcccagttacaaatgggatccgtgggcacaaacaagggcagagcccagcaaggaggcagcgagcactctggaaatagcattgttggctgattgaaggtgtttgtggttgaaccaggtggcctatttcaaaatagcaacctgaccaggcgcaactgggctctccttctttccttacagatgttgtgaggacctagaggcggggccaatccagtcacttccagaggctgctctggtccatgccccaagggcaggagtttaagaggtggtcccaggaggcagtccttggtctcagtctggccttttggggtccctgcactggctgaggctcaacactgcaggggaaggctgactccatctccagccatcctggaatttcccttcatatgcagcccatgacaagctggaccccacaactctctggagttctggcccatgttggaggtgccacgctgtcctcagaggggctcagacagaggagcctgcctttgagggaagcaggtacaagcccacctcattgcagcctcttctctgctgctgtgtttttacctacactgctccagacttggcctttgaaagctcatgttgaaacatagagttccatgaaccatgagatgtcactggttacagagtttgttttttttttgtttttttttgagacagaattttccctcttgtcacccaggctagagtgcagtggtgcaatctcggctcactgcaacctccacctcccaggttcaagtgattctcctgcctcagcctcccaagtagctgggattataggcatgtgccaccacgcctggctaatttttgtatttttagtagaaacggggtttcaccatgttggccaggctagtctcgaactcctaacctcaggtcatctgcccaccttggcctcccgaagtgctgggattacaggtgtgagtcaccgtgcccggccaggttgcagagttttaaaaatttttaaaattatatgcccaggttatcattggtccactgagcattctcttgaacaaggatgaagacccagaaacccctctgccctgcagaaggccccctctggcccaaggtctgtctcatcttggctttagatcagggttcccctgggagctttccaaaagcccagtgccaggccgcaccccaggccactctggtccgttctcctggggagggtgtgggtgctccccaccatcccagtgtttgccggggctgagggttgttgccagatgtggacacagggcacagccaggggcaggtgggtgctggagcaaggccctgctgtcagctcaggaagcctgaccttttgaggggcccagccttgccaagggcaagtgagcttcagcctctgaaactcaggttgctgtggctcaggctgcagttagagacctgggcaagcatgggtcttcactgattagcagccttgggcacatccttgctctgagctatagggccctcctgtgtacccagggatgacagcagccccttgcaggctcactgtaaaggtggaggcaagagcactggggaccttgcacagtactggacccacactgccctgagtctcttccacttgaacaatatgcacactcagatctggacgctccctaggctggcctcctcctttatctgctgatcttctgacagacttccctagctcctaaagtatgttttctccttcttcttcaagagatttttggccgggtgcggtgccttgcgcctgtaatcccagcactttgggaggctgaggcaggtggatcacctgaggtcaggagtttgagaccaacctgaccaacatgacaaaaccccgtctttactaaaaatacaaaaattagctgggcatggcggcaggtgcctgtaatggcagttactcaggaggctgaggcaggagagtcgcttgaaccccggaggtggaggttgcagcgagccaagatcgcgccactgcactccacactgggtgacagatcgagactctgtctcaaaaaataaataaataaaataaaaaaagagattttcactattttctctgtccagttcctttgggagctgttagcctgtcagggaaggtcgctgcctttccccatgtactgtggtttgcttatattagagaccagcaggtgcctgtggttttttccttctctgctttttttttttttttttttttttttgagatggagtctggctctgttgcccaggctggagtgcagtggcgtgatctcagctcactgcaagctccacctcctgggttcacgccattcttctgcctcagcctcctgagtagctgggactacaggtgcccacccccacacctggctaatttttttgtatttttagtacggacggggtttcactgtgttagccaggatggtctcgatctcctgaccttgtgaccgcccacctcggcctcccaaagtgctgggattacaggtgtgaggcaccatgcccggccccttctctgcttttttccccttccactgacatttcacatttcctcaacctggcctttctgctttctttaggtccttcccccactctatgctctgtccaggtgaagttgtgggttaattataataataaccctctgttttgtcgctatttcctcccagggtgttctctaatcagcagaacttttcttcctctggttctaaaccttgggctaatctgaccatggttttctgagtggtttggtctgtggacactgaaatcccctcttgcttggctgggtcagttcactgagtaccctgcccatggttccctcttgtcctcctaaccccagggggcctttgacggcccaggcagacaagtcaatgcagcgtgtgctggtgtgtgcatgtatgtgtgacgcgtatgcacgtgcatgcatcatagtctgtaatttacacatagcgagttgcttctccccttccgctggtcgttgtttccttcattcccttgggcctgatgttgcacagttgcttggtggaattcccgctcatttcccagtgagagagcagaagaagtaatcaattgatctccgtgggatttggtctaagtgaagaaagcacaagtgagaattttacatcaccctttggggaaaggttttggtccaagaattttataatgaccgtgtttgggtgtggatattgtgcccagcaatgggaaaacatgatgttttgatgaggggttacgaaaactgattgttggatgtgtagacactagcattcatgaattgccagattccatggtacggtgacagaaggaccttaccatcttggtttaagtgaaacacagtgtattagttcattttcacattgctgataaagacatacctgaggctgagcaatttacaaaagaaaggggtttcactagactgacagttccacgtggctgaggaggcttcataatcatggcagaaggcaaggaggagcaagtcatatcttacgtggttggtggcagcaaagcgagagcttgtgcagagaaactcccatttttaaaaccgtcagggctgggggcggtggctcacacctgtaatcctagcactttgggaggccaaggtgggcagattgcctgagctcaggagttcaagaccagcctgggcaacatggtgaaaccctgtctctattaaaagtgcaaaagttagctgggtgtggtggcacacatttataattccagctactcaggaggctgaggcatgagaatcacttgaacctgggaggcagaggttgcagtgagctgagatggcaccagtgcactccagcctggttgacagagcgagaatttttctcaagagttcgagaccagcctggccaacatggtgaaaccccatctctactaaaaaataccaaaaattatctgggcatgttggcacacatctgtaatcccaactactggggaggctgaggcacaagaatcacttggacctgggaggtggaggttggagtgagctgagatagtgccacttcactccaacctgggcaacagagtgagactctgtctcaatacaataaaataaaaccatcagatcttgtgagactcattcactatcaggagaacagcacaggaaagacctgcccccatgattcaatcatctcccactgggttgcttccacaacatgtgggaattatgggagctacaagatgagatttgggtggggacacagagccaaaccatatcacatagtcacggggctgtggaggcccagggtggctgccttcaaccccaccggggctgctagacaccctcctccaggatttgaactgatgcccagcacgatcgggggcaggacctgggtgcagcttcccccactcttgtgcacgtccttagatagtatgtgaagcaaggcgctagccacaggctccaagagttgagagtgctggggtgcctcatcaggaactgtggtgcccctgcagctcctttctaggaaggcagagaaggcactcatgtcagcacctttcagctggtgtcaggtcagacaaaggcactgtctccactgcaaacaaacacaattcttttttgatgaatcagaagtcaagaaaccaggcctgcaacacagtagtgaagaggtagaaacaatccaaaagtccaataacagatgcatgggtaggcaaaatgcaggacgtccatagagtgaaatagtattcagccatgaaaaggaatggagtacaggtacatgctacagcatgggtgaaccttggaaaaattgtgctaacggcaaaagaaactatcatcagagtaaacagacaacctacagaatggaagaaaatttttgcaagctacccatctgacaaaagtcaaatatccataatctagaaggaacttaagcaaacttacaagaaaaaaacaaacaaccccatcaaaaagtgggcaaaggatatgaacagacacctctcaaaagaagacatttatgtagcaaacaaacatatgaaaaacaactcatcatcactggtcattagagagatgcaaattgaaaccacaatgagataccatctcatgccagttagaatggtgattattaaaaagttaggaaacaacaggtgctggcgaggctgtggagaaataggaacacttttacactgttggtgggaatgtaaattagttcaaccattgtggaaaacagtgtggagatttctcaaggatctagaaccagaaatatcatttgacccagcaattccattactgggtatatactcaaaggattataaatcattctactataaagacacatgcacacatatgtttatggcagcactatttacaatagcaaagacttggaaccaacccaaatgcccattaatgatagactggataaagaaaatgtggcacatatacaccacggaatactatatagccataaaaaagaatgagttcatgtcctttgcagggacatggatgaaggtggaagccatctttctcagcaaatcagcacaggaacagaaaaccagacaccgcatattctcactcataaatgggagttgaacaatgagaacacgtgggcacaggaggggaacatcacacactggggcctgttgtaaggtggggggaaggggagggagagcattaggacaaatacctaatgcatgtggggcttaaaacctagatgacaggttgataggtgcagcaaaccaccatgtcacatgtatacctatgtaacaaacctgcatgttctgcactcgtaacccggaactttaagtaaaataaaaaaaattaaattaaaaaagaaaagaaaatattgggctaagtaaaagaaacagatacagaagacccaaaattgtatggctcaatttacatgacacgtccagaatatgcaaattcgtggaaacagaaagcagataagtggttgcttagggcgcagggtgaaaaggagattaggaggattgaggaagtgacagctaaaggggcttctttttgggggtgatgaaaatgttataaaatggacggcggggatggtcacacaactccatgctaaaaagtgaattgtacactttaaatgggtgaattgaatagcatgtgcggtatatcgcaataaagccattacaacagaaagaatcaaggaacaaacaaaagtggcagggttgggaggacgggtctggaggtagcagggagggtcacagtccccagggcccaactgggagctctcctgttccccggaagacatgctgccacggcccctcccaccagttgtcacttaatctcaggaagagtctgccacaaatgccccgttgcgacggctcttcccagcagaaggggagaaaaagaggcccgagtccccgggagctgatcaaaggtctgagctgtgctggcagtgaccattgtgcaactgaacaaatgcgtggcaggaatataaacagactccacctttcagcatcgagcttggttaggaacatggcttgacagccagcttcgtcttcctaagccgatgttaaactccatccatcactttcattctttgcatgaatcttgttctttctatttggagccatgtactctgggtcttagagaatggaaacaggcccgaaagcctgtcagatgcacttaggataaatgagaagtcattcctttcgccatggcgttaggaagatgacggtgaccctgccggtagagatggccttccagagtgtattgcctgaatcctgcctatatccaagctggtgaaccctggctgcctgccggctgaatgatggggtcgttctcaattccacccagctcctagcttgctgttcttttccttcccattggcctgtggctctcccttccttgggtccccggcccctgccctcagccccacaatcccggagctgcattcaagcccctcacggccttctacactctgacgtcttgagaacaagcacacaaatgactgttcattctgtggtagactgaataaaggccccccaagatgtctgcatcctcatccccagatatgtgaccccagaaggcaaaggcacttgggagaggtgactaagtgaaggatcttgagctggagagattttcctggatatccaggtgggccccaaatgtcatcacaagggtccaagcagggaaagaaggagggcaggagggtcattgaaggaagtggagatcagagctggagagaagtttgaagaggctggctgccctctggccttgaagatggaggaggggccacgagccaagggatgcaggcagcgtctaggagccaaaaaagcaggaaatggatcctcccctgaaactccaaaaggaacacggcgctgctgacaccttgattttagacttctgacatcgggaactgcagggtaacatgttattctgcctgggctgctgtaacaaaacaccatagactgggcagtttataaacaacagatgttcatttctcacagttctggaggctgggaagtctgagatcaaggcgctggcagatttaatgtctggcgagggccacttcctggtttatagctggcatcttctcactgtgtccccacatggtggagggggtgaaaagtctctttctagggtcccttttataagggcattaatgccgttcatgagagcctcatccctatgaactaatcacctcccaaaggctccatctcctaataccagcaccttgggggttaagatttcaacacgtgaatttgggtgggacacactcagtctgtagcaggtaataagcatatgtcctgcaagcccttgagcttgtgtgctttgttacagcagtgacgggaaactgacacatgggttttacccttggcaaaggcagggaaacaggcaaggtttcacaagaaaggaagctgtaagatcccgaaagtcactagttctggaggacactgtccttcccacagtatcaacagacccaggtctgttttccacggttcttctctgactctctggttgaaacttatccagggagtttcccaattcttgtgtgtgtgggggggtcatcttgcccaaccctggccaggttggagcttgggccaggtgccctgggctggctgcagggcggctgctgggggtgtcctggccactagttctgatggagctccagcctctcctcacctgtcatgagcaggtgaggagacctgcccacatgacctgcccctccccatcctgagacgctggatgcccacgttttctttttgccgccatttcggagtctgctggggaggagggcgaatgccgtggccccccttgtcaggcggccctgcttatctctgcaagttgtctctggatgtctcacaggagccttcacaactccaggccctggaggttggccgagcccttgaaacttccccagcagccctggggcctcattgctgggtttcagcctgccgcactgttccctggggctctggcgctgagaggcccctccctctgaggggctcagttgcttggagtctgttcagcagctggaagaggaggcggtgcttcttcactgaggctctctgcctcacgtgctttgccatctatgttctgagttgatgtcttgacaaagaccccctccttggtcgtgagtgacagagcaggggccaagctccctgtgtctggtgaccttgagccccttctgccatgcccagcgggcttctgtcccttttgcttccaagtccctgttttccacgatggtagctttgagctctccactcctttgaaaccccgaccctaatgatgccggagggagccctccatgctcagaggaccagctgcagccacctcttcaaattccttttgactcattcttgcgtcatcactggatgcgtggttgagtccttgcttggtagcaggggctagggattctgtggttattccggcccactaggagtttacagtgtcatggagactaccaaatacagaactatgcaaacatctaattccattgtgatgaggggtatgatgagaaggttcagggcagcgcggcagggcccatatggtttcagggccagtgaggccatccatgagtgtgatgtttaggctgagagtagacacctgagtggcagggaatggactgtgtctgtgtgtgtgcagatgtgtatgtgcttttgcttaccacagggcaggacgccacattccagatacgtttgaaaggacgtccgactgctcgttcacttatctgtctgggaactgctcctggagcaccacaatgccaggcccaggctggggcatgaagcagtgtggactgaaatggggagtggacgccagcgagtggtcactgccttctctctggagggaaggaaggtagcagcttgggcaagagcgatggccaggagagcagggaggctgaatggagaaagaacggagaatgatcagaaggtcctgggtgccccagggccagaggctgattgaaagtgctggaagaggcacagggcaggccccaggggcctctagtctccagcatgaacaactgggagaccttggggtcccttgaaggagagaggcaggcacagagaagtgagttgtggggtcaaggggctgtgagctcctattcccgcttctcctggggtgagtgatggtggggaagcagggagtgcagcagaaagaaggaggggcgcctcagagaaccccatgtgactgttctgtggccctgatacgactgttctgtggctctgatgtgactgctctgtggctctgatgtgactcttctgtggctcttatgtgtctgttctgtggctctgaagtgactcttctgcagctccaatgcaactcttctgtggccctgatgtgactgttctgcggctctgatgcgactgctctgtggccccgatatgactattctgcggccctgatgccactcttctgcagctctatgagactgttctgcagctctatgagactcttctgcagctctatgagactgttctccagctctatgagactgttctgtggctctgatgtgactcttctgcagctctgatgtaactgttccgtggccctgatcgactgttctgtggcacccacattcttcagagccacactcagatggaagctttgctgtgtgcaggggatgaaaccaactgtcattcatcctgctggaggccaggatgtctgccacaccccccggggctgccccctgcctgtctttcctgaagacgttctctctctggccctgttcccagggcaggctgaaggacaaaggacaggaaggtaaggtcccaggagtgacccccagtgtggaggatgagagttgttggataaatgtcccagctccctcctccctccatggggcagttctggggcatgttctgctcagacctcaatgcagtcccagtgggatgaaccgaagttccctctggcagggatcctctctctagggtacctgcactcctgccttcactgtgcttcctgagatcacccccaaaatcaactgcttgcccccaaatctttgtcatagggttttcaagagagggacgtgaagcaaagacactcatgaaagttctttgtatgtactatgattggctctgtcagtttaatggaaaagttggtaatggtgcattattattattattattattattattttgagacagggtcttactctgtcacccacgctggagtgcagtggcacagtatcagctcactgcaacctcgacctcccgggcccaagcaatcctcccatctcagcctcccaagtagctgggactaccggcacatgccaccacacctggctaatttttttgtacagacgagattttgccatgtttcccaggctggtctcaaactcctgagctcaagtgatccacctgccctggcttcccaaagtgctgggattacaggtgtgagccactccaccggctgcataattttttttaatgagaaaatatcttaggaataatgcttggtgaaacattttattgagtcataaaggttctaatttacttatttggagctagatttttctgacatttaaaagcttgtgtctcaattaatttgccgtgtaaaaacaacacgtggctgcacactgccgtcccacccaggttaggtatgaggaggaggaggggagcaatcccgcaggcatggatttgggggcggggtgaccttcctaacatgttttaacttacaccgtggaggcaccttcagctgtgcctgcatctgaggtcaattccgattcccacatccaccccgctacacacacctcttccctccattccatcccgctagtctctcctgcagggtgagatctgaaataaacagaaatactgcagatgtcagaaagcaggtgtctaaagcaccctgcgctcttgagcctgtggcagctgcaggtttttaaattgatagcaggggtgaatcaagaaggcagatgctttgctgtggccccaccaagggccaaggacaagcggaggctctgttcacagtcactcttccttctaagactccaggtctgtgatgtaattaccaccaaaagcagaatcaagccaagttgtccaatatgacttaattaattatatttcacctgtaacagtgactaactggtccatacttgtcgggcctgctctggtggacggtaggtcagtctctgctggccccttgatgctcatctgtgctgcctgaggatgtgacagcggcccatcccgctacggggcccaggtgtgctgcttgggggaggcagcaggactctgaggaccacagatttaaaaaagcacaatattttggagcatctttttacccttttgttatggaaaggttgtcccatcccttgatcctcccacagatccctcgtctcagtgcttggaacttgcttggtttaagaagtcagaacaggagggctgtgataatcacacgctgatgattgtgaggcacaaggattggtggtgtctgcctgaagggtggggaggggaatgtgcgagccgcaggacgcccaccaacgccgaggggcgaggcacagggaattctaacctcccagcagtgggtggtcagcacgggatctactttaataccatgaatagtgtttccaatgacattaacagtgacaatggcaactaaaagcacgctccgttttacaaagtgcttcacatccatggttttgtttgatcctgatgatagcttgtgagtgaggttttctttataaagcctcatttcacccaggaggaagctggggctcagagaagctaagtgcggccctaccagccagtaaaggatagtgccggggcccaggggaccttccgagcctcgtggctgggctctggctgggtttggtgacaatggctctttctctggacagttgtgggtgcacaggaaggtggccccgtgggcctggctgcagcagctccatctgtgagttcccgtccagtccccaagagccaagggcatcacttgtcagacgaccgaccgagagccacgtgaaaccgtgggccttcgctggtgtccctttagaagctcgaagatatcccgcatgtctcacagttttggcctgaggcttccagcccacctcacgtatcccattccacgctcctcaccacccagcctgcctcagctcggtgtcttctgggctcctcattccagcctcggggcacctccctgcagccccatgcctgcctcctgttcattgtggctttgagcccccagaatgggtttctttgggagctggtggtctccagcattggaggtaaatcctgcagaagttggacccccaacttccatcatcagatggactcgacgtagctgtttatatcttcagctgggcagccacagcatgggtttggttgaagggagaagagagaaattgatttcaaaagttgataattaaatgtgtatgattttcttatttttctctttctaactttaagaggatcttcttggtcacagatcctgggctattttattttattttactttatttttgaagcagagtctcgctctgtcgcctaggctggagtacagtggcatgatcttggttcactgcaacctcagcctcctgagttctagtgattctcgtgcctcagcctcctgagtagctgggattacgtgtgcccgccatcacgcctggctaattttttgtatttttagtagagatggcttttcaccatgttggccaggctggtcttgaactcctgacctcaagtgatccacctgccttggcttcccaaagtgcagggatgacaggtgtgagccacatcctggacttgacatgaacactaagcccaaccctcctctggcccagtcaccggctttcacttgtcctcatgggccatctcccgcacctcagccctacccgacctgctcctctggttctgtttagtcttgtctgggcctctgtcagccagtggccaccagaggaggtgaaggctgggtcacacagactccctcctccccattgtccctgagcctctcaggcagacctgttttagggcttggggggtgtggaggtctccctgggggctggctaggatgagcccagggaggtggctggggatggagtgaaggatggaccctgtagaagcagatcctcagtcctgaccatgccctcctccaggaccctgaacagctaggccgggcacatgccagcgccttccactcttcctgcctctcgtctcctgaggctgtgtgggtgggggtggatggggcattagtacaaattttcccaccttcagactttcaagagccatgattcccatgtttgtttgttttttgagacagattcttgttctgtcacccggacaggagtgccgtagctcaattttttgttttttgttctgttttttttttttttttttgctttttttttttttttagtagagatggggtttcactatgttggccagtctggtctggaattcctgacttcaggtgatccacccgtctcagcctcccgaagtgctgggattacaggtatgagccaccccaccccaccaaatctcatgtttttactgcccttcccttcccagatcactggaagcccatcttgggatagtccccttcccttcctgtcctacttagaacagctacattccaatggtcccttgtagttggctgcgtgtcctggtgtctgtcagggcacagaatgcagctgaggcaccttgagtctgaaaagttggaaggacggagaattcaaaattggctttgagttgaaaatggaattcaaatacagtcagctcttcttgagtattggaattagtggtagagggtgtattggaggtacagtaatgatgtgtgtttgaatgtcacccctccactccgtcccagtggttctgtatgtctaactctatctgacttaagctcatatgacccatattaccctccccagacaacccccaagagggtgtgcatgggcgaggggaggtggggggggttgctggctgctcaagagcgacatggaggaccagggccgcacaagctcatttggaagcagatggggacagttacctctaacagcttcatgactgaatgacaccacaaccactggtgtccttggccatcagaaatccctttccccaagggagtggggaagctgctacgtgagctagctacataatatcaactagaattagaggcgcttgctttccatgttgaacttaatcatagtttgttattacttcccatccccgcctggcttagtttgttcattgtgcccctataaagagtgctgaggctgggtaatttatatatacatatatgtatgtacgtatgtgtatgtatacatgtatagtttatttggctcatgattccagatggctgcaaaagtccatggttgggcgtctgcatctggggagggcctcaggctgcttccacttatgggggagggcaaaggggagctgggtgtgcagagaccacagggcgagagggacccagcgggaaggaggggaagtgccaggtccttttcagcaaccagctttcttgggaactaatagagtgagaacccactcagccttagggaggggcgttagtccatttatgaggaatctcccctccttatccaaatgctttccattaggctccacctccaacacggagaccacattttttttttctcaaatttcttttttcactgcagcctcaacctcccaggctcaggtgatcctcccacctcagcctccttagtagctggaactacaggtgccctccaccatgtctggttaatttctatacttttttgtagagggaggtcttgctatgtagcccagtctggtcttgaactcctgggctcaagcaatccactcacgttggccccccaaagtgctgggattacaggcatgagccaccacacccggcctaggagaccaaatttcagcatgagtttggaggggacaaatatccaaaccatagtccttgtttcttaaaggatctggacctggcaggtgatctggcaggtgactttaggtcactatgggagtcctttaacttttacacaactgcaatctccacgtccacctctgcttaaatcacacggaggccggctgcccagcaagtttgagagcagcactttatgagttttctgctgatcattcccctaaagtgaagtgcagccagccaaggtagttattcaaaacctcgctcagtgcccacttggcttcctctgcccaagacaagatggcttgctcaggaagaaacacctgcatccccagtggcagcattgttgcagggcaaggagcagcatccacgactcttgtcctttctctgtgtctctaaatgcaaaggccaaacatgggacatttcaacagattcaagccaaggagagggtgggagaatcatagtctttaaaatttgttttggccgggtacagtggctcaggcctgtaatcccagcattttgggaggctgaggcgggcgggtcacaaggttaggagttcgagaccagtctggccaacatagtgaaaccctgtctgtactaaaaatacaaaaattagctgggtgtggtggcacacacctgtagtcccagctacttgggaggctgaggcaggagaatcgcttgaacccaggaggtagaggttgcagccaagatcgtgccattgcacagagcaagactctgtctcaaaaaaaaattgtttttaaaacaataaggcaggatttagacattggtaactgactatcccatgtttatttgaagtaccatggaattttagtggcagtatttattcaaaacctgtctcagtgtgaaaaaaatatttggtttcccagagactgtgctgggggaggaagaattccgggaagccacaattgggcttaagcatctctagtccaaacagttggggagccatcggtttccatgtctgtcgggtaattgaatgacatcattgggctgaatccggggtgactgtgcggcagggggctttcggcttcgagggagagagtctcaccatttcttacctataggaaaaatacccattgcgcatctgagaatttagagggtaagtaatgcccaacaccaagctagaatattaggccttggggaaatttattttggctgaatgggatttattttaagattctgaagtcattaccactgcactttattttctgagtaatgtgcctgtcttgtagactctcgggaggaaatgcttcactccagctttatttaggtcattaccacaaggccaaagcaaagaccacgtgtgaggtcactgactggctgctgccaagggcaggtttatgaccgtgtagtggatgccttcccggcagccccgccaccaggctggctgatgcacatgcccagctcccgcacgatgctttttagcctacaaggtgctgggctgttaaggggcggaggttcggggaacaggggctacgccaacgcacaggtagataggggctggtctgcttcccctggggcttcaggaaaacatttgaatgtttctttcttccccagtaacaatgagcaggttgctcggaccacttgccgggggcgtctaaccgacctcttctacgccaggcatattagccgcttgtcacgggtcagtgacagatggagtggacggtagtaggaatctgtatcggaaatctgtgtccgaccttcctttactgcttcctgggcttaaaaaccttgattaaaatgtttgtctcctggctgggtgcagtggctctctaatcctagcattttgggagactgaggcaggaggattgctggagcccaggagttcgagaccagcctaggaaacaaggcagaaaccccatctctacaaaaataaaaataaattagccaggtgtggtggcctacatctgtagcccagttccttgagaagctgagatgggaagatcactggatcctcccacctggttaagcccaaccaggaggttgaggctgcagtgagctatgattgcacaactgcactccagcctgggtgacagagcaagactctgtctcaaaaaaaaaaacaaaaacaaaaacaaaaaaagggcttctttttttccccccctcataaaaggcatatcctacaccaagttttcctcaaatatgaataggcccaagaaccacctgtagatcttgtagagctgcagattcggattcagtaagtctgggacagggcataggagtctcgcaagctcccaggtgacactgatgttgctggtctggggccacactttgaacagccgggccccaagcctctctcgactccaggagacatccagggctggcttgctcattgcttctccttagcatggtgcggtgcccactctgggtgccggggtccacgtccccatcattattatggtcagcatatagctgtgacctttctgacatcaatgtggatgtgcgataagtccatgtttgcgggaacctaaggaaagacccacttactcatcatctatgaaggtgtgggtaggagacaagagagccgtgcagagaaacgagagtcaggaagagaatgaggagctctgggcatggagatggacaccagggaccagtggggaagctgaacggggcctgggcctctgcaaagagacctggcggggagggggcagaagtagggtgctcacctgttggcatgtccagggcggggtggtggcagattcaggctgaagttcaggctgagccctggagacccaggcagagttgaccctgcctcctggggaccaaggagccttcagtgaactgtcaccccctactgcagagcccaggacgtgcagacaacatgttttgaatgaatggagtggaagtcaggtacaaatatgagacaagggcctgatgctgtgtgtaatgctgggtcagacccgtgggcaggtgagcagtgcttgcttagaggggaccttgggcctggtttcccttgctctgtggtcctgcttctgagctgagtagctgtggacctatcgtggggaggaggaactcagaatatgcccagctcagagtctgggtcttagaagagagaaactgggggcgtggtgcaagccctgagggcattcagctgtgtggtccaggggaaaccaccatagctttggggggtcagactgtgaggctcagaaccaggcagccggccccgcccgtgtgttctactccacacacgccgtgtgagttgctgttcatgtggtccagggcactgcctcaccctgagcatttcatccactggacactgggtatttctcatcgcagaggagcctgcacaggctacagagcacgaccagactgagagctctgagaggggccctggaggaaagaatttgcagcatgatgtgcccagtccttagaccctctgtccccaggtgtgtggcctgcagcatacctgtgcattctgtgggtcaccgatgtctccaagaagggagcattttctccggaacccagcaaggagcagctgatgaaggcctgctgactgcttttggctttgcgagtgctcttgaaacccgtgtactccccaggagctctgggcagctgcttcggctgcaagaagccttcactcacagatatggatgcgtcccagggcacctcactcctgcctttattcttccagccacacgccaggggtccccaggccacctccactgagattaggcagtgtgtttctatcatgattcacacattagccattgtgatatacaattttagccttagaaaaaagttgcaagaatagtacaaagaaacgtttgtacacttcaaccaattcattaattgtgagcattttgtctcatttgcttaatatcctctctctagtataatctctatgtatatatcttttcttacatgtatatagtatcatctctgtccatgtacatatcttttcatatatatgtgtgtatatatgtgcatatacatagatgtgtatgcaaatatatgtgtgtatgtatgtgtgtatgtgtgtatgtaaatatatgtgtgtgtgtatatatgtgcatatacatatgtgtgtgtaaatatatgtgtatgtatatgtgtgtttatatgtgcggatacatatgtgtatgtaaatatatgtatgtatatgtatgtttgtatatatgtacacacacatagattttagggcaagaactatttaaagaggttgtggacatcaggtttcttttcccaagtgctttggtgtgtattgctaggaatagtcattctcttatatcactgacattgttatatcctacccttgaacccatcatccttattcaaatagaatgccctttgcaaccacgttttttccggtttaggatcttttctcaaattcatgctgtatttgccttcatgatcttgatgatactgagggaaggattattttcattttctttagtaaagaaagtgcaaaactagaaccaacaacatcaaagtcgcttttattgaaaggcttggaatccacatcgatggatccttcccatcgatcagcaaaatccaaaaacctatctgctgggtggatctccgcatgtggctgacctccagggagcaggtgggcacggtggcctgttttcaggtttgcagtgtatgaggcgacaccatctggatactggcctcctccgagtctgtctgaccgagaaggcagcccctggttctccagtcttgactctggtttcagatgctgctcttggattaaaaagcagatttctggccacgctctttgatcacaaatttaattacaaaatttgctctaaccccaaaggaatgaaaacttaccagctaaatgaaagctgcaagttgctagattttgacttgatcagcctgtctttctgtaaccaaataatcattctttgtcccgatgcgatgttggtcaccctcaacatcaaagcccttttgtgggacgcctttatctctctgagggcctgtgtggtgcagataaggggagtgagaggagatgatgtgatcgcccttggccctactcttatatccggagccagcggtgggacttagaccgcagcatcctgacctgacttccaggctctgcttccagcgggagagcttctccagcaggctgaagacacatgcaaaattaagatacactttcaggctggcttttatgataaaaaccccaacttaaaatttttttccataagttactggggggcaggtggtatttggttacaagagtaagttctttagtggtgctttgtaagacttcggagcatccatcacccatgcagtatatactgcaccatatttgtagtattttatccctcgcccccctccaactcttccccctaagtccccaaaggccattgtatcattcttatgcctttgcgtcctcatagcttagctcccacgtatcagtgagaacatatgatcttcggttttccattcctgagttacattacatagaataatagtctccaatctcatccaggtcactgcaaatgctgttaattcatttctttttatggctgcatagtattccatcattgtattatgaaaattttcaaacacacagaaaagtggaaacaattgtaaagtagacactctaggttctacagttaatatttgcggtactttatcacacatctacccacccgtttatctctcatccatcaacccttggcatcttgtgtttaatgcatttcaaagtaacttgcggacctccatttgtttccctaaatatttcacctggcgtatcattaattagagcttcatatttgtttacagtccttttttgaggtaagatttagatacagtgttatgtgcaaatgctaagtgtacattcattgagttccaacaagtgcataaacttctttcaaggcttagaacatccccagaaccctagaagtttctctaatgccctttccaagcaatacccccttcaatcttcagaagcaagcactgctcttattttttcttcaccacagatttgttttgcctgttctagaactttatagaaatgaagtcatgtcgtatgtagtcagttctgtctggctccttccgttcagtgtgttttgtgctatattcatgtcatttgtgacgtgctgaggattcatttctttttgttagtgagtagtattccattttaagaagatataatttgtttttacattctcctcttaatgggctgtttctgggttttggctatgattcataaaactggtgtgaacaaatatttttgtggacataaattttcctttatcttgagtaaatatcggattgaaatggttgggtctggggtaggtgtattttcggttttataagagacttccaggcccttttccagatggttgcaccactttacatccaccagcaatgcttgtgcgttccagttgctccacagcagcaccactaaagtctttttaaaatgttagcgattcccgagtgcagcatgtataaccttccaaaaaattcaacatcatcttccgctgtgtttccatccatctgaagcctgttagaatttatccaaatccaaatcagtaaacccagagtcagttctccaaaaattgtgtggaaaatctaaaatttatctttactactgctggctgccccctcttggcacttctgtgctcttaggcaccaggaatttggtaacctggtttctcatctcttccattgttttgttttgttggagagagagtctcactctgtcacccaggctggagtgcagtggtgccatcatagctcactgcagcctcaacctcctgggctcaggtgatccgtccacctcagcttctcaagtagctgggacttcaggtgcacgccaccgcactcaactaattaattttttttttttttttgtatttttttctacagatgaggtttcatcatgttccccaggctggtctcatactcctgagttcaagcaatccacctgccttggccacccaaagtgctgggattacaggtgtgagctactgcgtctagccctcttccatcgttttcaaggagggatcaggggtcagctgttcgcaacttggtacgaatgagtttgtcattggatcacctcccttgggaggaagtcttgccctggggatgtaggaacaagaactaacatgctcagtgcctcctaacagccccactttacctagtgtgtcaattccccacagacaagtaaactgaggcccaggaagcatcgttgcctgaggttgccgagttgataagcaaaggtctcagtccctgtggactcagagcctgggcttctcccctgggaccctgcagctccaccggcagttattccaattcttcctcaggtgttggaggcttgtatggaaactccttgcttctgtctctcgctcagcccttagaaaacctccaagagatggccactcctgcctgtggtgcagagaacgcccaggcagaagacccttggaggctcagacagagaactcactgcactttcagtcatcctgggctggctccccggcccctctcacgttctttatggatttgacccaaagtcttccagatggatggagctgtgggcactgagtctgggaatgtctcagcccaccttggctcccttctccagcaggagtggaggtgtgtgatgtcaaacaggcccagcctctctctcagacccggttctgggcccacacagccccttcttcctgaaagcagaggtggcagtaagaggatggctttggcctttgaatgttctcaagcgatccaagttcagagtatactgttgctgtcctctgtccctgaagcttctctcctactccttggacaaactcacttctcccctcagggacttctctcatgtagcagagtgtacacctgctgccccagcaaggccttcacaatgatccaagcctggcctgttgctccagcttctggaacctcccatggccttcggtctacttgaatgctcctgaggccaggtagctcatcactgccggaggacctgttgccactcacttctagccacaagaaatgtctgcctgtcctgagcaaaacccaccttggaggaacttctttactcccttgttgaatttttggctctaccaaataaacatgaattgcttccctgtgaaagacctccaaacactttcctctgcctgtgtgttgttcatcagtggtgtagccgaatccagggcgaggaggacctgcattttagctggtgttaaccagagtggagggaggattaggagtggcctttgggtggacaggaggtatgacaggctgcagatggtggagcaagccttgctgtgcccccgacccagctcgacatgcacacgtgggtggttctggctccctgggtgggaagaatggtggggtgggtgggcattgtgagcctggcaaccagaccccacggaatagcagggaggaggaggaaggaggacgccctccaagaaacagtggagtgaaaccttagtgcctacttcacagcccatctggggtctctccctgcttgcttctgggcagagggtgtccattataccacaagcacaaccttgaaatgtgctggagcaggaagtcgcgcaggacctcattccccaggactttccatacatgaggaatgcagggctgagcaggtgagatgcggcggtgggaggcatgccgcctgctccctctcctgattcactggggttttgggctgcaggcagtcagaaggtctcattttggggggttctcagcaatagatggggatacagtaggagggcaaagtcacagaaattctctgccggaactccaagacgcaggggctgggaaccgtctgcaggacccagacccagagttggaccaggattaaaggtggtggggggtgtggggtgccgaatgtgaagaacagaacggaagtgcaggaagacagcccgacctccaggagacaccatcactctcggtgtttccctccctgtgtttctttcttccaagaaagggtatttccaagaggacagattggttgaccaaaaggccattttatttctactttataaaaatagatgaaaggagacttgaaattattttgcctcttacatcactgggtttgggttctggaagtccctggagggtgcgcctgtagcccagacttcacaggtagacatggaggtcatgcaggtcacatggctggttgacacctgtaaagctatgatggccaagcagaactttgccgggtatctctggtcctattccctcccccgggtcatctgcctccctcctggaattgattgattaagtgctgtccctccatttcgtctaatagaccacgggaaggataggccaaacaagaagggcctacttcaacttacaagtcaagtcacggtttcagaacaccttatctccaacctctgtcctcaccacaagccagcccgacaatgtcctcatccgattttctcaaaagagtttgggcgatcttgagggcaaatcccattaaatatctgtacccagtctagcatccagagttgtcagcgttcgtgagcaaacagatctcagaggcatcagtgttcgtgagcaaacagatctcagaggcgtcagcattcgtgagcaaacagatctcattcttagtgagagtgcttctcctctggaagctcttgaggagacaccctccttacatcttccagctgcaggtgttaccggcaaaccgtggtgcgccttggctcacagccacatctctccaacctctgcctcctcggagtccttttctgtcacttagaaggacgctgtccctggattcggggcaatgctagggcaggatgatctcatctctgaccttacatctgcaacagccctttccaaataaggtcccatcctaagattctgggtggacatgaattttgaggagacaccattcgaacatatctttgtatctcttccttctcagggtgtgtcctaccccctcacagcttattctttttcccttcaaacactctgttgagacccttacacgaggcggtttccccagacaccgcacagatctctcctccctaacgagttccgcagactctctggaagtctggctggaaatgctgctctccctttttccttctgggatggaaaaacgctcccaatggctccaccagtcagtcagtgagacgttccaaaccggtctttccacttgggcttcctcatctgtttatcttttatttatacaagcctcaaaccactgaacactgcttggtaaacattccctcatttactatgcaaatgttagcacgggggcccacgcccgcccttccccaggaaagccactgagtgctgaatgcggatggactttcttcacattctttggggttttcggaaagggtatgtttttcctaacgtcacttcaaatgtatttcttaacaaaaacctcctaacctttggaaaatggaaaagaagttactcatctgaaaggaaactccaagtttttaggacctctaccaaacccctgagtgactgcggtcacctcgcctgccagcatgctaagaaggcattgtcttgccacagggctgggtttctgccagcgatttctgcaacatgttatgtctgggttatgtatttgaattcccggccaggattttctggtgggtctccctaccctccatgaaagagtccctgtgcagtgccagccctgcatcatggttcttgcaacgactgagcattctgcacgcctggaaatgtggagcagccgggaggatgaatggccgtcagcttctgagtccctcctcatctttacagtgcaatagtgagagtctttttctaggtcagtggtttgtaaaatggccagctttagagggaaccaccacccttctaagaattgtaactatataatcacatggcatttaaatatattaccaagaccaagggcatcagagggcatcagtttctcagctgggagtgacttcctcacactcctggattcccttggcaggaggcagatgaagagagctgctgaaaaagtgactttcctggtttgtgatctccacgggaaagaacatgcgacccgtctgagccttgaatgtcggaatgaagtgttttgctgctggtcacggctattctgggaagcacggctgtgggtctgtgagaccatagaagaggtccttaaaataatatgcacgcccgggagttgggagcgatgagcggctgtggggagccctcttctgcctgctgcttcctggtcctaccctaatgtgtatgtgggctgaccccaggccattcaacaagcacttattgagtacctactgtatgccagacatgggctgggccccaggaggaagtagtcttaggtcctgattcctccttttgtttttgttttgttttgtttttgttttcgagatagggcctggttctgctgcccaggctggagtgcagtgacctgaacaaggctcattgtagcttagacctcctgggcccaagtgatcctcctgcctcagcctcccgcatagctgggtctacaggcacacaccaccacgcctggcaaattttttcttttgtattgttttgtagagacaggggtctcactatgttgcccacgctgatctcaagctcttggtgtgaagtgatcctcctgcctcagcctcctaaagcactgggattacaggcgtgggtcaccgcgccaggccctgactcctccctttgtgctgcccatcacctatcagggcaggggagaccttcactcacattgtcacagaataaagggaccaatgacctcagagaagcgacagcgaagtgctgttttaggtgtcgggaagtgggatggcagtgggccgaggactgaagggcagcagggaggaatgagaatttgaattggcgctgagtgggatgagtgtttgaattggcactgattggaatgagtatttggattggcgctgaatgggtcaatattggttctccccttttgggttgatgctgatttgtggccctagcgtcccccaggcagggccccaattgtgttgcttgaacttggcctctgaccccaggctgacgtggaccctgggtttagctgctgctgctcgtgggtttagctgctgccgctcggctctgcttctgttgcattctggttctggtcatctgctcagtggctcagcccctctggggatggctcttgccatgtttagtcccagtgtcaggagtttctggtcctggagtcagccctgccactccctggaggaccttcccgaggccagctgcctaatccccagccccgatcccctgtctgtggccttgtgtcgttgtgatccacactgtcctgcccaccacgctgtcacctgcttgcctcaacgctggccagctactgctgaacacccttggaagccctgacctggcccaggctgagtgtcccctcccctgaccatttgtggggacagctcctccagcactggccggctctcgtcggggtccattgggggccacttctaggctagaccctcactgcctgcctgtctgtccctagagaccaccaatggcaaggagtccatctggccagtggtcccatggacagtggaccgtggacagtgacagcaggttggacagtgactgcggtggacatgacacagccctttcttgcagggaaggttgatttcagggtcactcttgcacttgatcttcctaaagaggaagcaaggaagccagcctctccaaagcgctgattgcatcctggggtctctgagcaagctggctcagttgccacctgtgggcatgcactattcttccacttgcagattagatgccaggacaagtgtcttccaaaggccacctagaaagcaaacgtcaatgaatctggggttagacctggctctgcaaggacccaaaggtcatggcagccctcttcctcctcgtcgtcctcagcggtcagcggcttctgatgtctctgttccccagtcgctgcatacttgtgcctcagagctgagcttcttatctaccctccactgacgctgcccactcgggaaggagcctcccttgctctgaagctgccactcaggtacggaggctggagggcgccataggggacagacagggtgggtaggggagtgctgcctgcctggcagattcacccaatgccagcatttctcatcacagcacctcagacaaggcagcctgacacttaacagccctcattatctgacctaaattcctgctgaaattgaggtcggcctcttctgattctgccccaagtgatctggaggcctcggtcggtcaccatgcccctgtgaggggacacaccctgtgcacggaaactgatggtgaccggggccacgttcgctggtgccctgccttgatgcccacttctagagaggcagagctctcagcacctacattgtcctgggggccgggcaggccgggacctggcgtgtggctggaagggtggagtgatagggcagtggaaatgcatcttgtgccctgtgctccggcgtccctgccctctgcatgggttcctgggtgaggccagctcccggccccagcctctccggagggcccaactgacccttctcccttcaggcttcagtgttggtgccacggaccctgttgtctgggcataattgggcgtgggattatgtttaacctacaggtgcacacctgtagtcccagctactcgggaggctgaggtgggaggattggtgcccaggaggtcgaggctgcagtgagcccagatcctgtcatgcactccagcctgagtgacagagagagaccctgtctaaagaaacaaacaaacaaaaaaaccagccaattactaaacaaacaaaaaagcagtgagggtcggacatggtggctcatgcctgtaatcccagcactttgggaggctgaggcgggaggattatgtttaacctgtttaacatcttcccctttagactctgtgtgagtcggcttgggctgggaacaaagcagtgcaaactgggagcttaaacaaccgacgttgattccctcacagttctggaggccggaaggtcaagatccaggtgtctggacagagccctcctggcctgtgctggtgtgggcggaggcggtggtccctggtgtgccctggctgcagccgcctcgctccccctccacctctgttgtctcatggtactcccttctccattcatttgcatccaaatgtctctctttttataaggacatattagatttagggcccaccctactccaatttgacctcattttaactacacctgcaaaaatcctgttcccaaatacagtcacattcaccagttcggaggggtaggacttcaacatatctttttgagggacacaatttagcccccaagagactttaaggcttttggaggccatgagcgggtcccactgaggccccaggctggcctgcagcaggcagggccggcaaatgtgtgtggaaggagtggggcagggcagaggccggctctcagataggcagctgaagaaaaacccggcacatccacggggagttcgtgctggtgtcttctctctctcttttcctctcctttcttatatgttgggttcttctcaaatgtgaattttctgtatcagcatccctcctgcctgcccataccctcctcccaccacccaagtctcacttcctgttttcggcctttcgcctgaactgcttcagaagttgaaaccccacagggctgggcctgcccctgcgaggcatgttttttttctggaaggaggaagcggcaacgggttacaggctggaggctgtccctgtgctcagatcccacacacgtccccagcaagccccagcccctgccctgcgggaagtggggtcttgaacactgccccgtggggctctctcaggggcaggtgaggcagcgtcttctcgcgccctcatttccctcaacttatctccagggcaaaatcctatgcagtggcacccagtggccggccctgactttgatcttgggtgctttcttctccacccaaaaggctctgaggtcatctctgtatcagaaaatcagcaagatctgcagcgggacagtggggactgatggccactgtcatcagcatcatggtgagcacttgagctgtggtttcctcaggacaaattggccttccccacgtgaactcgcggcaggcagagaatctaggttgggaccctggactgcacccggtgctgggctcctggccttttccctctccgccctgctaaggctgctgtgccgagccctgggaccatccaacagggagaaaggccttgggacaaaaatgacactttctcaacatcacccactgttgaggttacaagaagcagagagtgtgagaacgtttccaaatgaaagtgggggaaggatcgcaaagaagcaagttagttagggctgtgcccagccagcgccagtgccaacgccgagccgcctctgcaggggaaaccgaagcagatgtggtgagataatacatccaaccctgagtgctactctaacctgccagaggcggagggttctcagtgagatgaaagcattacagatgcgttagatctaagggaggggcctgcagatgcgcagctggcagagaaaccagggaggggctgaactgtcagtcgcgaccaccagggatctgaatcagttcaccgacagccttggggacattcaccttgggctccacaacctgtcagaaatgcccccaagcccaaaggcgtcgagagaatggccaggttgtttcagattgacacatatcctaatgtacaagtcagcccacacaccccacgtgcactgagcgtctcttgttgttcaccccaaataaactctgccggaactggggcgggactcgcaggggcggagaaggggggagacgggcagagggcagaagtggatggtgagaagagccaatggaggggccccgtgagagtgagcaaggctgcacccctaaccgacgtcctggggctactgtacaaacaaagaaccacaggctgggaggctgaacaacagacctgcactctctcgcagctcggaggctgcaggtctgaaatcgaggggctgacagcgctggtttcctctggaggctgcgagggagaaaccgtcccctgcctctcccaggctctggggtgagcccttcctggcatcccgggctcattgtagatggatcactccaatctccatggcttctcagggcttccctccatgcacctcaaatctctctctccttccttttgtaaggatgccagtcattggatttaggttcaccttaaatccaggatgatctcatctaaattacatctgcaaaaagaccctttttccaagtaagttgacattcacaggtacctggggttaggattggacatatcttttgcaggggtgcagggggctgccactgagcccgctgcacagggtgacctgggccaagggcccttcactttcacttcctcattggcaagctgccctgtgtttggactgggtcgaggctgtcaaccttgctgcccctcggagtcccccctggtgtcccccaaacagattctaagctgctttcctggggctggaggccaggcattgggattttttaaagagcttcccagcaggtgagcagcctttcatgggtatcaggagaccttcctggcaaatgtggtgaaggtccttcctcctgagcgatgccttagacccaggagcccagggaggctgctcacctgatcgttaggacaggagcagtggaaacctctggcctcagaccccctggaggaatccctccctctaagactctgggactggtgcacgcaaggagctatcgtgaacattgctcccaactggccgcttgcttgtcccccggctccccttggccccagtggcggctttgcctgaattagagggcgtgagagccacctgtgtctcagcactgcaattaaagcaggaagccctttcggaagcagccgtgtgcaccagcctcccatgggtggagcagagcaaaccacccacttctgccctctgcccttcttcccttttctcgacaccctgcggccccccagtttcagcagagtttatttggggtgaaaaacaagagatgctcagcgcctgtgggatgtgtgggctgactcgtacattaggatgtgtgtcaatctgaaataacctggccgttatatggatgccttggggcttggggggtttctggcagtctgtcgagcccgaggtgaatgtccccaaggctgctggtgaatcagatccctggcgttctccgttggcagttcagcccaacagtttctctgccggccgtgcctctgcaggtccctcctctgatctgattggattaatatttgaatcaatagactgagtcaagcagaatgtgggtgggcctcatgcaatcagctgaagccctgaaaagagcaaaagggctgccccttcccccgaggaggagagaacccctcctgccggacggcctccgaactggaacatcagctttttgctgcctttggacttgaactgaaacattacctctccctgggtcttgagtctgcctacgttggcacgggaactacacgttggctctcttgggccccagcttgctgactcaccttgcaggtggtggtggacttgtcagctccgtaactgtgtgagccaatttcaatttcttagaatcacaaatttctttctttcttttctttttttcttttgagacagagtttcgctttagttgcccaggctggagtgcaaaggtgtgatctcggcgcactgcaacctctgcctccaggttcaagcgattcccctgcctaagcctcctgagtagctgggactgcaggcgcccaacaccacacctggctaatttttgtatttttagtagagatgggtttttgccatgttggccagactggtctctaactcctgacctcaggtgatctgcccgcctcagcctcccaaagtgctgggattacaggcgtgcaccaacatgcccggcccacaaatttctttcttttcttttctttttttaaaatcagttttctgtttctctggagaatcctgacaaagagcgcatatctgagaattttaaaatcatttattggaactattgaatctgttgtattctgtttttacttttgaaaatccttgcggctgggggaatgtacaccttctctcttttcctcttaaacattaaagcctgattcgaggtagaggcaactcactgttgtgatgtccttttatcccaacctcagccccggcagaaagactccgcgccttgggacattggtgttttccaggagtgactgtgctggggcagctgcctgttgcgatgagggctggcggggaacgatcccctctgagtttggcgtcacttatttggaaccctccagcagaaagctttctaagatgccacactataaactcattcatgcagttattgcgtttcagttcagattctattgctcttgcttcattatttcaaagccacatgatgatatccattactgggtgcagaatggccctgatgggtctagaagcaccgtggtctgacccgtcctaagagatgatccagtcacgaaatgctggtgcaggtgtggatcgagccagttatcttcactatctggaaacaagaccctgaagtccaggtggccaaggactgcaccagatctctttctttttttttctttttttttttttgaggcggagtctcgctctgtcaccctgactggagtacagtggcatgatcttggctcactgcaacctccgactccctggttcaagcgattctcctgcctcagcctcccgagtagctgggattacaggcatgcacccccatgcccagattttgtatttttagtggagagggggtttcaccatgttggccaggagggcctcgatctgctgaccttgtgatctggccgcctcagcctcccaaagtgttgggatttcaggagtgagccactgcactcagcctgcaccaacttttacagacaggctggagtcctgtctagaagtcaggacaccaggcctggctggcaccctattctccagaccacgctgccctccgcagccaggtcccaggacccagacataggtggatttttgtttctgacttgcattcgctcttttacatgaaccgtgaattctttgtcctaacgttattgttagggcgacagcattcctgatcgtggtgctaatgcggttatcaataggctccaaagcttatccttgatgctcacgatctcagagttggaagaggccctggcaagcacccaggccagtcttctctggtaagtgccctatgcccttaaaaccacctcaggatttcaaggacagagacaaattaaaaatagaggcttaattctcctgattgaaaagaagggaagagatttttctctcctttttctctgagcattactctttatttatttatttattttttgagacggagtctcgctctgtcgcccaggctggagtgcggtggcgcaatctcggctcactgcaacctccacctcctgggttcaagcaattctcctgcctcagccttccgagtagctaggattacaggtgtgtgtcactatgcttggctaatcttttttgtatttttagtagaggcagggtttcaccatgttgaccaggctggtcttgaactcctgacctcaggcgatctgcccagctcagcctcccaaactgtctcctggcctctctggtttcctagggaggccaaaagcctaacttagttgatcttgctccaagctgcaaaaccacctcctgtcatgaagataggagttcattcttcttctagatacagacaattaacaaacacagatggtaaccccagtgaccaggtggttctggggtcaacggtgtgtgacaaatggcactgtcagggcctcttccttaaggactagttattgtttatgttgaaaacacgcatgcagttagttgtacctgtttgagtctttaaaaggataagatcctttctttgcagtctcttagccattgcttgtgatgcatatcatcttctggcttaacggttattcaataatgaaacttttctttcttttccacctttgtggagaggtttcctgggtttagagcacacgtcttttttctttctttttttttttttttgagatggagtctcgctctgtcctccaggctggagtgcagtggcgcgatcttggctcactgcaacctccgcctcctgggttcaagcaattctctgcctcagcctcccaagtagctgagattataggcatgtgccaccacacctggctaatttttgtatttttagtagagatggagtttcaccatcttggccaggctggtcttgaactcctgacttcgtgatccaccccccacccctcccaaagtgctgggattacaggcatgagccattgtgcctggccagcacattttatttttaattatatttccccagtaatggccttacctacatttaatgacaataagtgatggatacttaaaatacactctagttctagaaggcattcccatacattaattaatttggttttcataaaatcaggaggcattaaaacaccattaaattagaaggcatcactattcccttttggtaatttctcatttaggaaaccgaggcactgaatggataaatgccacccaggggaccctgtccagccgttggcagaacgaggactggactgagggtatttggctcctaatccagggctttccccaggttccactgtgaggcatgcagggtctgaaaacacaccggcacgtgcgtgtccactgcccccctggccttagctatgcctttgctgtgttacggaagcacctctgaaggcctgggcgcctcttctgggagtttctcgtgtctcttcgccttccgatctgctctggccttgccacgagaaagcgacaggcccatgctgctccttggggcctggagacaatgtcccaaccccaggccgcaccctcgctttccatccaacccggcaactgctgcccgtggagggccacagtctccgaagtggaatgtggaaaaggaaaagtcattcgggctgtgataagaaagccgagcttcttcaaaggtaaacagaaacagagacaaagacgagggcacgtgtctgtgtgagtgagggagagagagatgggggaggggagcaaaacagaggcggcccggagaactctccagaagggtccgaaggctgccacatggaggagtggcactcactgtccagtgtgagggtggaccaggcttctcggatgtggtcgttccagcaggaaggccaaccgtgattccatatcgtgaggaattttcaggcagagccatctgtccacaaaaggggccatcccactggattcgtgtcctggtgttcaggaggacacggtcccgtcctcaaggtcgtgtgagcacctgagtcacccggatgccggggggcctatcctccagtgcctgagtgagagaggggtgaggctgggagcctgcattttctatatgttccctccccatgcaggtggtccccacacacaccccgagaaacagggtgttaagtcaccgccgctgtcagagagccacctggatgggctggatgctgggctggatgactcaaggtctcttccaagtccaaaccattttttggttgcatgactctcctccctagctcgtcctcacattctccatcacaaccagctttccctgaaaataaacccagctggccaccccttggagatgagggcttctcccaccctgcctctttctgcctgcacctgcccggcagccgttaccatgcatgcccatatacatatgagtgaatatgtgtacatgtgttagtgtgggcatgtgtgaatgagcatgcatgagtgatgtggcatatgagtttgtgtttgtaagtgtgtgtaagtgtgaacgtgtgtcagtatgtgtgtggacttgtgtgagtgtgtctgtatgtgtcggtgcacatgtgagtgtggatgtgtctgtgtttatgcccagtgtgagcgcatgtatgtgagtgtgagtgggtgtgaatgcctgggcatgtgtgccctgaaagccagcatggcacaccagtggcctccattgtctctccagcccttggatgctgtgtgggggatgctggcctttctgcacagaggccctgagcgaatttggggctctctgctggatggactgtggaagacacaccccggcattgttggacaccaagtgctggagaattctctccctggtgggttacagtatggggttgtttttctcctcagagtgtttacatggacagggcaaatgtgaaaaatccctccggccatcatgcaggaaaatatgtataaaggataactggagaaaaatgccttccatggacaaaacacagacagaaacacacacacacacacacacacacacacacacacacacaaacagcaggggtatctttcattgtgcctcaataaaacagaggttgaaggagacaccaagctagaaacagactgttaattttgggatttttttctttaatcattttaatataaagagacagcatgttacaatgacattttatggatgattataaattattatgaagtcctcaactggtaaaatgtcttgattttgttcccctgtcttggggtctgtggttaaatcatgacagaccagcagtggagtggagtgtgaagaactgcggcttgaggcttagacaagcctgggtttaatctcttgtttactggctgtgtggcctttctgaacctgttttctcacctatataatagggacaaaggacctatttcatagggcaatcgtgaagatgagagacaacagtgcaccagacgaattttgagttttaacctgtaatattatccctgatttaccttgatattttatagacattcatacattatagtagcaaacattttgagatgatatatacaagataatacaaattcatcttgcattttaaaatgttcagatttacttaaatcataatactttttattcttttagtgttaataaaatttcacttccttgagtattatataatagctttaacatttattcttttcgtatgaaaacgttttttaatgagccaattctgtgtgaagcttttggttttctataaaagctgctgtgttccaaggacacccgttgtacgcagcccctttgctgtgagatcatttccagcctcctttttgtattcttgtcatggcatctgacatttagtcattagccaagcaaatgcagcagttcatcatctcagagattaatctacagagaataaaagaggtagcaacgttggtgcgggagttaggcgagaaggtcccttctggaggaatcgttttgtatctagaacaccagggaattatgctcccgaaccatgcagccaacgtgaatctttgttaattcatctgaatgtttcctcagtaaaatcaacaagatcttcttcatccaatgttaaaaattgggcttcagcagtcaacactaagaagtgagaggcaatcaacggtgcagtatgaaaacatcatgagctagaaagaacttaacatgagatttagaaatctacttcacatataccatgatgactactgaaataaaacattaatcacctgtattcttatcactcctcaaaatgttttcttcctgtcccagggccctttctggagttttctccatgcttatataactgtacagagttgtcactttcatggagatgaaattgcatgcgttgctgttttgacttcacattgttaagtatttgtttgtgctactaaaacttcatggtgagcatttcaacgcccgtgtaatgctgcatccagatgctctgtaataattactctcccactctcctgtggctgtccaattatgtaatttcccactttaagtcataataggtaatgcacatccctgtgaccacagcttcgtgctctcagcccaagctccgggaggagaggactgggtcaaagcacctggacatttttgtgacttttgaagtgcattgtggaaccgtgtgaaggacgcttttctgaacgtgatgttccactttgatttgatgctgttttcttctgccagttcagaacgatagggtaagagaatactccgtgttgatggagagactcagatatgagtctcaaatgtgttttctgcgtaacaacgagatgggatccagcgatgcggtctgggcttttgggtactcacctttcctaaaagatgccatctgcttggagcagaataggctgtgacacgcaggagcccccagggaaacggccatggcaatggtgggtgttaacgagcaggcataagggactgctcccagcggtgcttcctctgaagtcattgccacctgcagcagcacaggggacagaaaggccgtttctccaggtccaggcagctcaggcccctatgagccctggcgtagcagagacccaggcttcttggtagaggcccagagccctgtactgccaccactgccggacgatgctcaggacctcggggctggcactgctggctctggtcagtgctgtgggcccaagccaggccagcggcttcacaggtgaggggtctgggcttggcatgggcagttcttaaggacaggggcttcctggcatgggtctcatgaggacagccccctgtggagacctgggcaggcaaggacgcctctgcttggagaggcgacatctgttcttttgtggacaagctttttggtaagcgcacatggtagcagctgtggaggtggggcaggagtgccgggtagggttttgggaagaggactcccccagtgggaacctgttgctgaatcacctgggcgttcgtgggggtaaaatgcagattcttagccagcaggtctggggtgcagggcctggaactctacatgtctgtgggtgatgcagatgctgtgggtcctcagatcccactgagaacagtgagctcctacagacgcagaagaaaggtctcctgaaccttggtgcattcaagtcctcacttacagatttaaaaaaaaaaggagacctagcctgggcaacatcatgagaccccatgtgtaccaaaaaaaaaaaaaaattagccagccatggtggtgcacacttgtggtcccagctacacaggaggctgggatgggaggatcacttgagcttgggaggtccaggctgcagtgagctaagattgctccactgcactgcagcctgggcggcagagcaaaagcccccaaacaaacaaacaaacaaacaaaaaaagccacaatacaaaaacaaaaaagaaagggagacccagaatggatcagggacttgcccaggccacacagctcacagggcagagtcaccacaggagccagaggctgcaccagggctctgtccggagttttcccaggcatgcggagagcagggcagcttcttaaaaacacacgggagttctgaaaccccagaatccagggaaatgggactgcggaattttaaaatcattttcctcttaaaatctgtcatattcagttacaaatttaaaggaatccattctgtttctaaaatcaactatgtttttgtactactttaacgtttttcacccagaagcaggattttgctttgtgatttgtgaaatggattttcccattggaacaggtaatgtgtagaccccacagttcagatgcataatgggtgggtatcctgggaagctggagaaggtcttaggaggtgtttccagaacccctcattgtatatgaggacacggggcagaacctcagcaaccccacacgtggtcgccccgaattttccctgtgtgccagcactgccttcacaggcatgaccccacttcagccttttgcagccacaggacatggctgttatttcacagatgacaagagaggggcactgggagggcatgacatgggcgcaatcatgcaacaggggtttgtgagcctgggtgtgagcacaggtccatctgaccccaggactcttgttggccccagagcattaggctttcccatctctgagaccggaatccaagacccccggctcctgctctgatggcccttgtgggtctttgcgggatggcaggatctgctaactgctttcttctctgggcttggccaagaagccaggcttgggatggcacgtgacctcggataaaatgttaaaaacaaaacagggcaaacatctcccgggttccacaggagatgagtgtgtgtgtgtgtgcgcgcgcgcgtgtgtgtgtgtgcgtgtgcgcatgtgtgcaggacggctctgctgcggaccagctggggccatgtaacgatcaggtggggccctggcacctctctagagaccaggagctgtaagtgtccttaatgtggttggcatctctgctcaggttacgatgaaaaacgcaagctagatccactctgctaagttcttggtgcaggaagtcctcggcctttgcctagctcggcgtggtcactgagtaggtgagcgcgttccttccggccatattccaccgttcttcatgcaagtcacctctaggctctcagccaagctgccctggtcccggaagctgatttgtcctgttccaccccgtacgatgaggacctcccgttcctttgcagagctcacagtaactaccccactggtgatgccaagcagcaggtggtccccatccccagaggccctgctgggcccgcagggtgatttggggttcagcccccagaggaagttgcagctccagtccctgttgcttgtggagtggggtcgctgtgcagcaagtgtgtggtccagcacctgtgttctgcccagagcaaatctgcagcctcttccctcaccgtgtttgagggctggctctgccctatttcttcctggggtgagtaacaagcccctggagtcctgctttctgcacacttgtaggttgctgcgaggtccaaggagggaatcttcagagatgctgccccagtggagcgaataaggacagcagtggttttgtgatcatttctgctcccatctctgtgttcctccccagaaatcaatccagctactcattgagggaaatcaactgtaatactgagcccccacctcttgggggtacagtctagtaaagcttagagctcaggggttgagtgtctgaaatgcaagcactgtatgtcaaatcctccgttcatcctgcactgagagtccatgtactcagggccccctgctaggtgccacgggggagctggaggggacccttcaccatccctgtgtgcactggctagggctgctgtaacaaagaaacacagcctgcgtggcttaaacagcagaaatggattcggtcacaggtctggaggccggaagtctaagatgaagttgcgggcagggctggctcctcccgagcccctgcaggagtctctgctccgggcctccagcttctggagctgctggcaatctttggtgttccttgacaggtagaagcatcaccctggtctctaccttctccctgtgtgcctgtctgtctccacatttccctttagtataagggccagtcatattgtattagggcccaccctaatgtctccactttaacttgataccctctgtaagacattactgcagataaggtcatattctgagttactggggtttaggactttaacacactaatttttggaggaacacaatcaattcaaactaggcagtaggggctcccggggagatgggaagcccaggcaccacgtcaggggatgtccatgaccaaagagtctcgtggtgaatgtcatggggccaggggtctcgagaacggagtaatcacgttgatggaggggcgatgggccttgtgtaaaggaaccaggctccagtgagagatatgtggggcccaatagggtaaacctgatgcttgtcctgcagcgggggtgactgtgcctcctcctgatcacagtggtaacggctgaaaagttgaactggtcttttttttgagatggagtctcgctctgtcacctaggctggagtgcagtgacatgatctgggctcactgcaacctccgcctcctgggttcaagcaattctcctgcctcagcctcctgagtagctgggattacaggcaccagccaccacaattttttattttattttttatttttgttttttttttcagagggagtcttcactctgtcacccagggtggagtgcagtggcgcaatcttggctcactgcaacctccgcctcctgggttcacgccattctgcctcagcctcccaagtagctgggactacaggcgcccaccgccactcccggctaattttttgtatttttagtagagaggggctttcaccatgttagccagggtggtctcgatctcctgacctcgtgatccgcccaccttggcctcccaaagtgctgggattgattacaggcatgagccaccgcgcccagcccacacccggctaatttttaaaaaatatttttgctggagatggggggggggtttcaccatgttggccgggctggtctcgaactcctgagcttgagtgatccacctgcctcggcctcccaaagtgctgggattacaggtgtgagccaccacgcccggcctgagctggtcttttatcatcaacaaacttctcacacacttgccacagagcgaccgcactccacaggtgctttaagtacctgcttacttatcttccacctcattgaaaagaaagccgtcattgtcatgtcctggccacagcaggccttcagtttgcactgtggagggaactgctgcacattcacttcccatgtggcaaccttgaggctcagggggactaagagatagatgtgcacgagattctacggcctgtggaatcagctcacatggagcagaacaaagggacgtgatctctaagcattgattccagcgctgtgctctctccttcgtatatggaccgtgagaaccctgtgcttcaggaagcatgcgtggggcccaggtggcacctcctcctcggtcacagcggctttcttagcaggccaggctacgtttatgctttattcttctgtgctcactcatgcaacagccttcctggtgcactagcaggcaaaggccagtggagagggctggtgggcagcttctgagaggcctgcgcgagtgcgggaggtgtgctctcacttgctattgcagagggacgccttgcggataaccgctcgcacggatctgatcctggtgttctcagtcgccttcttgcttggcctctttcagaaaaaggcctctccctgttgggctaccagctatgcagccaccgtgtgacccacactgtacagaaggtggaggccgtgcagacgtcctacacgtcctatgtgtcctgcggcggctggatcccctggaggcggtgccctaagatggtttaccggacacagtacctggtagtggaggtccccgagtccaggaacgtgactgactgctgtgagggctatgaacagctcggcctctactgtgtcttgcgtgagtccagggctgctgggctggggcggggccacccttgccgtcgagacgcctgatgggacagtcaccgttggcatccattggccccgaacttgctagatcttccaggagcacggctcccagccttgaccaggcagcaggtcatcggcagggctttccctggccccactcctaggtttctgagtccgtgggtgggggtgaagtacaagaatttgccctcctgacaagttcctgggtgacgctgacgctgctggcccagggaccccactttgagaacctctgctgttctcagagggctcctggatggctttaaaaatgcagatgcctgggtctcttcctgagagagtgtgagggaattggcccggggcgttgagagagtgtcggaagttttcaaagctcccagagtgattctcatataccactgagtgtgagagccagcactgaactctcttctacagcagccttttctttctaaaagctgcagtgaaatgctttcgtagccaaaatcctattctgaactccaatacgtgaaagagctggaaggagccccgagcctaccaccctaagtgctcagaggcccccaagtcctcccagttcctcagtgcagtttggaagctgctttcctgtaggatgcttggggccagttaccagggtgacctgtgtggttatgccaggccagggtctgagccgttgggatagggcagggactcagggctcagcctactgacacacaggtgatctcttccaggggaggggtgtgtgtgtgtgtgtgtgtgtgtgtgtgtgtgtgtgtgtgtgtgtgtgtgtgtgtgtgtgtgtggtggctgctaattttgagtcaataccagatctgcaatgagtttctgtacagtcagaaggtcctgccttgcacccccactgtggagggatgtgggggtgtgtggctccagcttggtgttggccagggtcactgagacataagggctgtgacctccagagtgcagaagccaccagctcctgggtgccacgaaggggatcctgcaggacccatccttgtggcctgagactgttgtacccaggcgagttagagaaaacgccatactttgagacgaattaagagtcttttattagccggcgaccgagagacggctaacgctaaaaattctctcagccccgaagaaggggctagattttcttttatactttggtttagaaagaggagtgggggtctagttaaaacaattttacagaaataaagtaggcaaaaagttaaaaagataaatggttacagaaaagtaaacagttccaggtgcaggggctttaagactattacaaggtgatagacacgaggctttgggcgttatcaatcagacgaattcctgggaactgcggatatagctcgccacagtatcttatcagttaactgcattcttggatgtgctgggagtcagcttgcacaagttaagtccttgaggaaggggctgccagtgaaagaggcaagatggagtctgtctggctctcttagctaagggagagtccattcaggtggaaacaagcctaaaaacagggttagtaaaaacaaggttgggcattacaagaccaggacaacagcagaatggagcgtggactccgcaaaccagggtgtctgcctcctccagaaaccaagggccccagattgtagagtctggggtctgcatagacctgcaggctgggccatcctgagtgggccctccctcagcccccagtgctatttcactgatgacagggagagttgatgcgtttctgttgccccgttcagagggccaggcagagagagggcctgatggtttcgggtgtgctgttaacaggcatgttcctctttcaggagtgttaaaacaataccaccataaccaacacctccatcaccaacagaaaccaggcagggccagctgaccccagagcaacacctccatcaccaatagaaaccaggcggggccagctgaccccagagcaacacctccatcaccaatagaaaccaggcggggccagctgaccccagagcaacacctccatcaccaacagaaaccaggcggggccagctgaccccagagcaacacctccatcaccaacagaaaccaggccgggccagctgaccccagagcaacacctccatcaccaacagaaaccaggcggggccagctgaccccagagcaacacctccatcaccaacagaaaccaggcggggccagctgaccccagagcaacacctccatcaccaacagaagccaggtggggccagctgaccccagagcaacacctccatcaccaacagaaaccaggcggggccagctgaccccagagcaacacctccatcaccaatagaaaccaggcggggccagctgaccccagagcaacacctccatcaccaacagaaaccaggcggggccagctgaccccagagcaacacctccatcaccaacagaaaccaggcggggccagctgaccccagagcaacacctccatcaccaacagaaaccaggcagggccagctgaccccagagcaatggcccttctgtactctcattggttccctagagggccactggcaggacaagcctatgccttggccatgctgctcaggtgctggtctaaggagacccttcctgtcctgatgcctggccccatttccactttcttcgagggccacacacacagaggggcctgctgagctacagttgctgctgtgcaacaactccactcctaggggatagcggggggccattaggacacaggtgctggtgccacggcaactcggtttagagcatgtgggctttgcagtcaggacatgccctatcctgtccagtcttacctgtgaaggccacacctcttcctacctgttggcattgtcaggactagtgaggggaggaggccctgggggaggctgatcagcagccccttcctgctcccgctctgcagggccacaccagccccacccatgcccaccatcaccttctgtaagagaccctggcctgctgcagcaaacaagttaattccctcccagaagatagggaggcctctccccaccacctgccctgcatcctccttcacagaccagcctccaggaagcgcctcttgttggaatcagccccacttttagagtgttaacacctttaattagggactcaccagggcgatgcccttgcagtcagggagtcccgtgggtgagagtgggctgccctggggagctgcagggagtggagagtgaggccacagggagggacgtgaggcatgaggggaggtggactcaacctgtgggccctgagcccctcagtaatggcccctcaggttctagaaggctcactctggcacagtgaagagggggcagatctagaaggaggaaggaagagaagagggagggaaacaggcactgcctgagtgcattctttctaagaggccagggcaggagaccctccaatccctcgggcaccaaaggaatgagtatccctggctctgcatgtggggatccaggctaggggaggcccgcgcctccaccaccatggcacagttccaggaaggcaggctggggatgtggaccggggctctctgacccccaggcagatttttgggggtttaccaagctgcactttagtataagggagtttgtggcatttgagtgctgtggctgtggcgactgtgggaggaggaacatttcagggcactgaggacacggagttctttctcagaaaggtccctgcctgtgccggggcctggtgaagggcacagcccacgaggcttctgcaactcctgccgctggagggcctgtatcccatttcttcccagccccacggtcagagacaccatgctggtggtgtgaaggcgcctgtggtgggcggatttacaccccggattttggcagcgcgaacttctccatgcttgcacagctcttttgatcaaagccgcctttttctgggatgccacacagcaggttggctccttggagctggatgtgagatggtttcagtaagtgacctgttgagcaccgtgactctgatttgtacagaacgaagcagggcccgaagctggacctggcagatgttggaggcccctggaaatactgggaagcgtgaagggcaggagatgctccttcctctgtggcggggcctccaggtcacccgagtgtgggtgactcacacctcagctacccgggggtctgcgcctcggagtcctatcccccagacagtggtaaaatgccagacatgtttcctcctttctcctcccactcaataatgacttatgcaaaaaagggaacggaagcatggacacacacgtgatatgactttcagtgactttttcaactttttcagtccagcatttggaatgcgatgacaactggtgcattattttaagtttttaaaaatataattacagaaatgaacacacgagccatacagaaaatttggaaacacagaaaagaacaggaggaggaaacgatcccaagcctgctgctcacgaataaccacctttcacatgttctttatccagggcagacatttcacaagaggatggccactgtgtccaagacatttgtagcacgattttaccactcagcaatgtatccacagcagctttcatgcctgtgaacatgactccactgcatgcttttacggccacatggcattacctcatacgcacatcagcattcattgagcaagctcttgccacttaactgtcagttgtttccaattactcattatcatacataatgctgtgatgaacatcataccgtacaaacacgactgtgcacaagttggattatgcgctgaggatgaattctgagaagtggaacccagcatcttagctgtgctctgttaactccagtgacaccccagctctgcacaggatcaacctcctggcaaactcagcctcgttaggcaagtccaggacccccagaggaccaggagactccccaaaacttcctgtccccgcatgctgatgaccaggggccctttggtgagaacctcctgtcccgaccaggcgaagaggccccgaggaaggaggagggagacaggagcgactcctcctcagcccacccagtcctcagccctgggagccttgggttttgttgctcaaacacaaagctcccctgttgcctcactggaccatgactagcagtgttgccaggagctgagcagttctgttttattgtttgcattgagttagggacgaaggagatttgtgactttctaccaagttggacttgttcagcgttctcagggcactcagtcagctggccagctccaagggatggaggggcttcccggcagtagccagttaagatgcaaacctttcacttaaaaacacgcctctggtgattaggcaactatttttagaagccagttttggggggattgtttctatttaaataggcttttagtttagaatagttttagatttgcagggaagttgcaaagataatgcagaaaggtcctgtaccccccaacccagcttcccctaacgttagcatcttacagctctcgggactacttgtcctaaggaactgacactgggcattgtcgggaaactccatagtttatttggattcccctgttttcccctgaatgtctttttctgtcccaggagcccaccttccatttagtccgcatgtctgcttaaccctgaggcctttgctttttgcactgggagacaaagcagagaccttcggattctcagcaagcctccaccaggctcctggcgttgccctcctcgagctgcacccaacgttcatttttcatgcacggccatcggtagagctgcctggatgatgaggagatgaagagtgagtcagggacaacgcaggaaagagagtgcggctgagaggaatgcccacagcaaggccgggcgccaggcagacagggctgggtgaggagagcggggatgcaggctctctgcatattccgtgactctggctgcccctgctctggccagctgagcagtgtccttggtgatgtggtcccagcagaagccagggccgccacctctttcttcgttgcagagtgctctgcagagaacttgggggacccgagaggccagtccctgggactgcagcctgctgaggctgcccttccgcttggccaatcccacgagttttccccaccctcgcgggggtgagtccaggacccagttaccagctggcctcctctagtcttctgggctctgagaggtcttgagctgtgctcctaaacatccccgggccatagacacacaaagcttgccatgtatctgggcatgaactggacagctctgagtaaagccccaggggggcatggcacccaccgtcagggtggctggctatggaggccacagagctgggcaagccttctctggggcccagcactggggtccctcctccctctgtgtcctcctcatggctgccctcagcctcgtcccggagctcccatcttctcagcttccttccgtcctgggagatggggtcatctcctgccctgggcccacctctgccgtcttggcaaaggcacactgcaggctctgcggcatcgggcacacgctctgctgtctcctgacccctggggttcggtttcttctccttgccctcctcttgtgcttcttggagccctgagcatcagcctccggactcctgacagcttccctttgggtggattctcagactcctgcagtgctttctgagacctctataagcccctttttctggaaagcccaccgtggcctccccctgcagccttggctgaggtctggtccccaggaccagcacacctcccatggggaccccaccgggttggcctcttgccttcctcatctttgcctcctgcagaggctggccgcgtttctgtgtctagagctgcatcggagctgcactcacactgtgaagggctggggagctgtgcagccaacagccagcgggctggcctcaggggccacctccagtgccactctgccatgcgtctccacatgggcgagcagtggacatgtccgacttcacatttgcactgccacactcctggtctacaccaggccgttcttcccgcagctttccccagctcaggaatgaagccccagggatgccagacccgaagcctgggagccttcctgaagcttcttcttctcttacaccccatcccgtctgtcagcacatcctgtggacgcccccacctgatctccccagggacccatgctgcactcacctgcactgtcacctaggtcggcccccaccacaccccacaccaggcctgtacctcgccttgtgggcgccagggctgatgtctgcagagctgctccgagctcccctctgcccagcctaggcatgagcccctctccagagtgtccttccaatcccccacactgcttcattccctgaggctctcaccccatctgaatatctgtagatctccttgcactattgttcccccactggaatataagttccctgaaggctgggccctgggcacccggcattgtgcccggcacatagcaggtgctcaacaaatattgaatgaatgaatgaatgaatgaatgagctatcaggacttgaagcagcaaggggccctttcagggggtggtggagccccctggacctggacttctgaggcctagaggaaacagagacacctaggaccccagctgaagctgccctggaaggacagatgggcagaggatatgaaaaccaaagccaatggccctccaatggggtgggtgtctgcccaggcatggggatgggccccgaacaggccacagacctacaggcagaattcagcaccaggaagcaccgacgtgaggtccccgtgcagcaaatcaggtttgtcttttatcgccagtatcattaattgtatcattttctcccagccctgaatcagtccgggcagttcacgtcaagacctggggcctgccccgcagaggggcctgaaccatccacctccccctgcagcttggacatcgactgtcctggacttgagaagtgctgcccctggtcaggggggcgctactgcatggcccctgcaccccaaggtaggctgctgcgggccatgcttatggacaggcagcaaaggcgggtctcggtgaggcctgatctgtgtgaaggtgtgggggggagtgtgtttctaggagcagtgaccgatttcatcaggagcccccaccgtgtgcacaggcagcacctgctcttagataatttcttagtcaaaatctggccactgaactctcgggggagaaatctcatggcgctcttaggggccctgaaatgggaagacacttctggtggagcagagacccggatttcccagtttgcctggagaggccaggagctccaggtagattagttgcaggtgtggagctggctgtgcctgcagtgccacaggggcctgacgagcgccacagcacccgtaggcaggccctgccacctcagatatgcgcctgctggtctggaaagttctcttttgattggggtctgcatccaggagaatgggagaatgggatggcctatacatatatatatatgtataatgttacatattatttaatatttaaaatattatatattatagcgttagtatggtatgcagtaataaagcaatagtatacataatatcagatattatgataatactatatcattatactacatgctattatatagtatatatcatattacatatgattatactatccaatatttgtagtatcaataaaataatgacaaagtataaagtaattttctatatcaacatactatgacagtataatgaggctgataggctctatttacctcctaagcagatctcttcaagggaaggcctgctgctgtgggtcccaggcccagctcacctctgagcagggatcggtggtcttcagggacattaggatggagaggagcgaggggcgggcagtgaggacatcccccgtctcctgtggtagatgtctttttgcagggaggtaaatgcagagcagggcctctcatggcctctggttccctctcctgccccctctcccaccccagcagcttttgtgacttcaacctgtcctgggtccataatcatcagtgttttcccttgtgtagctccagagagggaccctgtgggctcctggtacaacgtcaccatactggtgaaaatggacttcaaggaactccagcaagtggaccccaggctcctgaaccacatgcgccttctgcattccttggtaggtgagacagacgggggctgcctgcaccctccttgtggcagctgctcaggcagacccaggtatggggccgtggaagggacctgggggttggggagggtgatgttccccaaatggccccaaatgactgactctgaacgaaattctagttcttaaaaaatcagcttcaaagaggtatgatttacatgcaacaaaatgcacacaactgaagcgtgtagttggctgagttgttatgtgtgtaccctcataggcccgcctgtcgtggtggagaacgcggatccctaagcttgcaggggtctgcagtcccagcaaagacagcctaagccccgagctcttccctcaccaccctcagtcccaatttcttcaagttctggctcctgcttcgtggaagccagcaccaacctgggagtgctgagatgggaaccgtagcccagggctggagagcaccctggggtctgatggttagcagcgcccctggcctctccacacaagtcagaagcacaccccagggtggcatccaaaactgtctccagacgtcgcccactgtcccctggggataaaaacaaacaccctggctgacccttgctgatgacacaggtcatgctttctggcccatcagcagtgattaccaaccaggatgtcttctccagctcaggccaccatcagtctcgggaatcccagtgtggacagggcgctgcgtgtccccaaggctgccgcgtgtccccaaggccgccctccctgggggatggtctggcttcaggaccggctgctgacaggggcttgtgctcagaggggcctcagcttggtctaatgtgctgctgttgcctctggaaatgccgaacacttttcagacaaggggccccgcattttcctttggcatctgtgtagctgttctgtgcttcagatcttttgtgtgtcccatatgtccctgggtgtcttggtgtcaaacccagggttgggtcactccttggccgttagactaagctggctggcagcccagatcagatggtgcacacctcatgttgttctgggctgctggccagtgagctgctagacaggtagtctgcagcctcggccttaacagcccgggctaggagtgattcctgtttcctcttagcttgttaaggggactgcccaattggccagtaagaaactagctctgaagccacactgcctggccctagtgttgccactcatcagctgtgtgaccttgggtaagtcacttaacctctctgtgcctgagatacctcctccattaaacataaataatcggccaggagtggtggctcaagcttgtaatcccagcactttgggaggccgaggcaggcggatcacttgaggtcaggagttaaagaccagcctggccaacatggcgaaaccctgtctctactagaaatccagtaattagccaggcgtggtggcacgtgcctgtaatcccagctactggggaggctgaggcaggagaattgcttgaactcaggaggcggaggttgcagtgagctgagatcgtgccactgcactccagcctgggctacagagcgagactcttgtctctaaataaataaaaagtaaataaatagaaataatcataaccctgcctgagacagggccatgagcttaaatcatacatgtaaagagcttgagatggttcctgagcttcctgatgcgtgtggggcctgagatgttgtggttgttgtgttttcaatattgctgcgtgacacctgctgtctcctcgtgcatgtaggtttcatgtctccaaccagcccattaccccctgcagaagcgcctgccttgcacaggggtcaggcaccagcaggggctggtctctgaggcctgcttctgctgctgaataaggggttccgatgaggtcggggctggttcccagttctgtatgctaaattatgagctgcatctcctcccaggaaggggcttcaagtgtgtatcggaggactcctgctctccccaaacctcctttggagttcccagtggaggcttgggggtttgctggcaaagtttgttctggtgaccactggtctggctgtgcagctgccagttcacctggcttcccaagggttgagatttcaagatattaagctgaaataaaaatactgcatatgaaatgaggaaagtgatcattaaacctcagaaaaataattggatgtgtacaacaggagaccgtggcttttgatctctaattgtctaattctagttctaattctctgttgtcagctgcaagagacctgcagtcttggcaagggcagaagaccgagggtcctgggtctggctgctgtattagtgtcctggggccactgtaaccaaggaccacagactgggggcttcaaacaacagaaacttattctgtcacagttctgggggctgaagagtctgaaatcaaggtgtcggcagggctggttcctcctgaggcccccaggcctctctccttggcctgcagacggctgtcttctctgtctcttcacactgtcttcccccattcatgtctgtttctgtgtccaaatttcccctttttgtgagggcaccagccatattggattagaacccaccttcactaattatatctgcagtaaccctatttccaaataaggtcacattctgaggtactggaggttaggacttcaacatatggattttaggggacagaattcagcttatcacaactggtactgaaaggtactgatagttccggtttgtaggacttctattgggatagtgatggatagataagtactgtagaggttctttgctgaagagcagaatggtacgtgtgtgtggacagttcatttcagctctgcgggcctcagtctcctcgtctgtctgacggggtgtccttctgctgtgtgacactctgattctgccttcacaggtcaccagcgccctgcaaccaatggcctccaccgtccaccacctgcactcagcccctgggaacgcctccaccacagtgtcgcggctgctactgggcctgccacggccactgcctgtggctgacgtctccaccctgctgggtgacattgcgaagcgtgtctatgaagtgatcagcgtccaggtgcaaggttgggcttccctcaatcctccctctggggaggctgcagggtggtgcctgaacagccaaaatgcaaggtggacgctaaagccagaccagtcctttgtcttttaaaggaggtttaagttcaggagcaaaagaataactggttcaagtgtgttcatcccacaggtgtgggacccatcttcagctcaccctgtaaattccaagtccccaagtgcagacctctagaacttattttgccccccatttcccgcccctctcctcttccctccatctctcctcggatccctctggcctcctgccccctcggcaggcttctccttccatcctagtggacactggagtgcaaatcccagagccacacacaaagaacttgtttcttcatttctttggtttcctaaatttccctctcgcctctttcccacccttgccaaggacatccttgtactccaaaggctccttcagcacaatttgtctaaagttgaatttgtatctggcaaagcacatagacgtggccttgtttctggaagaaattacctattctttgttgttgttgttctatgtcaggaattggcaagcctcatctaaaagggatcagatagtaaatatttttggctttgcgggcccacgtggtctctgtctcaacgactcagccctgctgttgtagtagtcacagacagtccgcaagcaaacccctgggctcccgtacggcttcctgtacccaagcaggaggcagccaggctagtctgctgctcccagggctttgcaggagggtggctgccttggtgaagcctcttctatgacactgaggaggcacgtgacaatgccagggctcagagccgtgtgaaagctctagtgattgcattgatctcccttcagatccgcacatgttctgcagaaccaagctgcattgctctagtgccattaagcaaagtgctcgttctgtcatctgctctgtcaatgacctttggccagaggttgcaggagcacacctgtgggtggaccagttgagtttattattcgaggcagcgagggagaacccacaccatggagaaccatgtggtttctcagtaggagattgttagaaagaacctgttataggatgtgggttttgactgggtggtttggggagggtctagggaagtgtgattttgttctgaattgaatgccatcagaaaatggaggcaactccacgactgggaatgtcaatacatctaagcaaaagagatgggaacaattgcataaagataagccatagtttgtaaagaactaataatcactcatttgggccaagggaggggcattagtattttgtgggtgacacatgagcttatcgcgctgtctgtacttagacagcattatgaagaggccctgtctgaggctggctgctgtgagatggttctgtttgggaggcctgggccagcctcagaacgtcaggggtggctctgggtttccttgttggcgcagaaaacacccactgatttactttacgcttggggtgggatgttttggccccaccttttcatgaccactcagactcagtccagcccagagtgatttgctcacgtgaggctgcccggtgagccagccgcgagccctgcctgaacgtgggctgctgcttggatgacgatggccagcagccgcacagggccttctaagacgagacttccatagtctcccttgggatcactgcccaaggcacccctcaaccgacgtggcacaaatccgtggcacgagtccacagaggccgtgtgtgtgcaggtagatgaagatgacgaggtagctgcgactgctgagtgtgggtcctgctctccttccctgtagatgtcaatgagtgtttctatgaggagctcaatgcctgctctggaagggaactgtgcgcaaacctggagggctcgtactggtgcgtctgtcaccaggaagctccagccacgtctccacggaagctgaacctggagtgggaaggtaatggctaggctctctcagatggcatgggaatggcttaattcctgtttgccccgggaatactcaccagcagtgcttacagctgcagcattcaccccgagataactctgccatgaaatatcttgcttttattattattttcgcatcactgtggtatattgactttggaaacagaggacacaattctacttatagcattctgcttttagtagtggtatttccatttacaaaatatagtgattctcaatcactgaaaatgtcaaatcctagaaaacagcagtcccacgtgtgttgttaacattgttctcgaacaagttgttggccgacgattcatttgctgaacctgtttttctgaaatagatgattctgatgattcagacagttctgatgttagttctgtttagaagtaattccaagaacagtttttatattttgttttcatattgaaaatcagttagatttgcttcagccccaaagagcttgtttatgtaaaattaaatgagtgccggcagtgagctgccgtttttttcttcgaaacgggaaaagggtgaaggcattttttaaaggctggatggtcttcagaccacagggactcttcttgccaagagggaatggctggctaaccggcacagaatacacttagttctttcagccattattgatctcctagtgggccaccctcgcatcttctttggcttaggaaatgttgatttaggtgctattcactgtgctaggtgctggtaatggaagcatgcagaagcaggtcctaatctctgcctgtctagtggattgtggaaatggagacattttggcgcatgaaagggcaggactgatgtctgcactggaaccacgaggataagctgggaccatccctagcatcgcgggatcagcctggagagcagaagagcggactgggtgttgggggaagcatgtagataaacgtgcccaggtctgtccctgttgggagtggggagggatgtaccagccaggactggcacacgggattggctctgccatcaagcagcttggaagaagaagtaactgtgtaatctgaaatgtaggaaggtgctataaagacgatactctgagtgcaggagtctagggtgtggaaggtggtggagaaagggattccggcaacattttagagatagaacctctggaacttattgattaattcagtgaagaagaggaaaaaggaaagaagacggaatccagatgtcttgactgaacagtggagtagaaggtgtttccattggagaggatggggaagacccgagctgttgttattattgtcaataatagttatagctgagatggagtgagtggcggtgccaggatgctgattgagttggacgcgtggtgctggagcacagaggcggggctgggctgcatacgtgagtccagggtcacctccaggtgacacttaaaccatggtatggctgagagaagggaagaggcctggggcctgtggccagagaaccccaacagtgccaggtcagtgcaggaggagaggctgcagatgacctgggtaaggcaggaaaacagctggaagggcgtgcgcagcaaggtcagcagggaaggctcagcaagccccaagcgagcaagcggtaagctggccggcaagcagggagggtacacgcatgggtaacagcagggcaggaaagtgcctgtgggaactacggggatccggtgcagacttcaggagagcagaagggaagcagccagcagcccgggttaggaagacagctggaggagagaaagaagcgagaatagccgagaatcctgcagggaagcttgactatgaacaggctgagggaaggaaagcctgatgtggaggaggctgtggactcccagggggtctctcaaaagacaggcgaagctgatcccggctctttctattccctgttcctttccaggttttgaccttattgaacgcagggttgagggtttttttgtttttttttttaaaccttatttaaatcctgctacatgtgtaattttataagctgctttcttcagttcctataatgtgtataaagtttccaagaagaagcctggttttcaccatgataattattggtggttgaaaactagtggctttctaaagcaatcatataatattctttcccctcacgggagcacttctgttgctttcaagagtctggaactgtaaccttgtgacaggggttacagggaatctctttatatccaatttgaattcgttaatcatttaatttgcatgttctttttccttaaaagggactcaacattgaggaccatccctttgttcacaataacaccacagctggcagttgcccgcacttcacgcgctctgggctctgctctgagcactctgtgggtattgcttcgtttaaattcttagactaaccccaagaggcaactactctccttaagctcattttttttttcagaagaggaaattgagggggacgaaggtgattttcttgcataagatcccaaggctggtcctctgaagacgcacatgaaccagctgtgtcccaaggctgtcttccctaggagccctctggcggggacctgcctgagagtgtgatgggctctcccccgccctcgggggctgccttttgtcccagtgcactcaggaaaaccgccatgccctttccaaccttcatgagtgcttaggaccaagagttgggtagagctccagaagagttgaattattttatttggcgttctagaacccaactaggaaaaggagtctaaggttctggtttatttatttatttaattaattttattgtttgttttttatagagacagggtcttactctgtcacccaggctggagtgcagtggcgtgatcgccggtcactgcagcctccagctcccaggctccaatctcagcctctggagtagctgggaccacaggcatgcaccaccacagccatgcgccaccacagctggctcatttttaaatttttttgtagagacgaggtctcactgagtagcccaggctgttctcaagctcccagcctcaagagatccttcctccttggcctcacaaagcgctgggattgcaggcaggagaccccgtgttcagcctaaggttctgattggctcttctcgttgtcctgtgggcgaggggttgggggagtggaccagttcccagagccagctgtggatgtggcgggctccagggtcagatcttccccccatcaccaggaacgttcccctcctatcagaatgaggctgtgtggggagagcggacttgccctccacccactggcagatgaatccctggtgccccgcaaagagcaggcactccacaaacgtttcctggatcaatcacggaaagagaggttttcacagtggtcatccccggggtctccaggtattaaaaatttccagcccagctctgccagcaaaacactgagaacactcctgtaccccgcagcacgtggccttgagatccacttagaacttcgcgccacgtccacatcccacggcaccccactaagctctgcagagaactgtctatagattcctgctctgtggcttccagggtgagaatcctgtccctttcgtgagcacagaaggttggaaaacaggtattttccaaatagttatttttaccctggtcagtcatccggaaaaatattagattctatttacggttaggtttgttggcagtcacactctgccgtgttgcttggcacagtgaactgccagattgcgtcaggatacagggccgctcgagcgaccgccaaacacaaagaggggaggctgcgcggccccagcttcacttctaatagggcaggacacactaatccagtgtttccagatcagcagtttagagtgaattccaattgcatattgctaagggaaacagcatccccggcaccttccctgctgaaccagagatgagtcacggctgcccgggaagaaacaagggccagactgtcagacgtggagaacccagggtgctttacccagatagaggcaaagttctgaacttgtgttcctagctgtggttggggagggctgtggagcaagggctctggggcctgaagtttagattatccgcattgccgtggccttgggtcatacaaacccagagtcaagagcatcattttctagggccacatttaagggggacactgaaaagggtccccatttaagggtaaccaaaggagggtgtcctggctaatgaaaaaccaaaaaccaagttataggggcctaccctggaagagaggagtcgggggtagaaggaagatttccagttttaaaataccccaaggtctgtccaacaaaagagagattggccttagcacgttagaagttggttggttggttttacaacacaaagaaaactctccaagctgtgctgtccagccacgggaacagctgccgtgaaatttcgtagatatgtaagtttcccgggtttccctaacaaaggcccatgaactgggtggcttcaaacaagagaaatgtatcctctcacagttctgaggaccagaaatttgaaatagttaccactgggcctaaatcaggttgccagcagggctgtgctcccaggaggctctgggagaatccattccttgcctctctgccctctggtggctgccggcattccttggcttgtggctgcatcactcctttgttttcttctgctgtttttttttttttttttttttttgagacagggtcttgctctgtcactcaggctgaagtacagtggcacagtctcggctcactgcagcctccacctcctgggttcaattaatcctcctagctcagccccccaagtagctgggactataggcacacatcactacgtctggctaatgtttgtgttttttgtaaagatagggtcttgctatattgcccaggctggtttcaaactcctgggctcaagccatccgcccactttggcctcccaaagttctgggattacagatgtgagccaccacgcccagccctactccatcttcaaggtcaacatctttgttttttctctattccagcttcataccgccttctcctttgtgtgtgtgtgtgtgtctgtgtataaatccccccgattctcttttataaggacacttgtgattgcatttagggtgtacctgggaaatccaggattatctttccatctgaagatacttcactgaatcacatctgcaaagattccttttccaaataaggtcacagtcgtaggttgcagggattaggacttgatatctttgaagctcattattcagcctgctactggtgataggaaagcttagtagtaaggcaagtgaactttgctatttcctattgttcagctttgccatttactacctacttgacctttctaggcctcagttttgtcctctgtaaaatggggatcctagaagaacttattacctgggattgctgtaaggactaaataggataacatggctggtgcacacagtacccaggaaacattacctgtaaccatgtcgctgatagcttggctggtttgtgacatggatgtcatgggagggagtactgcagggggctcacaccagggagttaatttatagctccctgcaagttcctaccgctgctataatgcatgctgcgttagcttggacactgtggaccttaactcatcattgttccctcagtgtttatggtgatgctgggtgcatagtagaagctcaattaaaaaaaattgagccataagaaattggtgcccttattggtcaaacatggtcaaatatggacaattccaaatgcttcaaggtaacacactggagaaagggccacacagatattggatgggaacattgtcctcagggataatgcatttctttggattagatgagattcttttaccccaaatgcttgcaatctctcttagttgcaaaagtcactgacggcagcttctgcagatgcctcggagggcttcacagcatttgaaatgccaggtttgcaggtcccccatccagtgatccaaaaaccccctggcatcttaatttaaagagtaaatatacttattaaaagaggtaaagcatgcattgccagccccgtaccctgtgagacttctttccaaacaccattcctctgcgttcttttcaaataagtacgggtgcccttttaattttaactctgctccgttcagaagcactccttatagaatgcgtttttaaatggcctgtaatctgggtgggccatctgttgtcccacccatgtgctctctcgctctgcgtcaagtttgatatctgaatggcaacaaggaggcaaggttggagccctgggtgtgggctggggggctgctgttatagctgctgcgcctgctcgtggccgccccactttcctgtttgcagggcgttttgctgtcacaccatcctccaccaacgtggattaaaaaaatgcttggggctgtgtcctgactgtacaaaaatagaacagtcagtgcttttagcagactttttggaaaagaaattgtagcccgcccttcctttttcagtgagacatatgttcccaaggaacagactttaagaagccgggtggttgttagaaggccaggcagtgagtggggggtctttttgattccagggttctggtgaccctggagacgggggtgccacccacaatctcaggtcccaagctttgggccaccctcagttgaagcatttctgcttttcttgccactaaagaaaatatcataaagaatgaatccatgtctgtttccctgaccagtatgccgaaaatcactggacaatcctgtaaaaagtatagatgtgtcttttaaaaaactacattctaccccacatcctagaagtgttattaggacacatcagaatttggatggatgtcactgatcctgtctgagtgaagcctgtccagattccagtaacagatgctcatctgctgggaggtggagtggcaggttctcagtgagggagctcacctacacagggaccaagattcaaaggaggcagctcagtctcaggttggaaggaggagacagcagggctatgtcgcgtggtggtgactgggcactaaattggattctgagcctctcagcagccaaggcgcaaagggaaatgagttggacagtgttgggttttttttgtttttgtttttgttattgagagaaagcaggcacatatgtctaaaagcagaattcttttcatgatactagaaagcatatatcctaccagtccttacagaaaaggctttgggaagccacacattataaaattattattttctttaccatggttttgcaaaatatatttttaaaagttctttgttgcttatttttatagagcttaaattctgatgtgaaaattttggtgcgtagactgggggccgtctactttttatataattcttactgcccagacacttgctgtacagccagaatgtttttaaccaaaaaagagcttcgatgctatttgagcactagaatatatataggttggtacatcagagctttgctctctgaggcatggatttcaataggaaagcataaaaagggcaataaaggaagctcagcctgatttctgagtccggcttcctgatgaggccattgtttatggagtgatgagtcagcccagtgcagaagttctcgtgcaaatgatcaagtgcttgtcatgaatcagagcagcccagggcctcaggagaggctggcaaggcagtatttgtagatgtggcacagaaaccttacactgtcgtggccattgctacaaatgttttctgtacgatgactgtatacgggtccccagagagactgttctgactttctagtaaccaccgattccggatcccagagagccccacgactcaatgctgttcactgtgtagacagaggcacacttggatgactcccaccctctaacttggctcagtgatagagaggctgggatttcaacttcagacctcttgcttctccatttcatctcaaatatccccatcacctaatgcaatcctgagctaccttccaaaattactcagaagcctagagagagagaagattgatacctctgttttgaatgaatgggttgcatttattattggaaaaaaaaacagtgagtgggtcaggtgcggtggcgcacacctgtaatcccagcactttgggaggctgaggtgggtggatcacgaggtcaggagttcaagaccatcctggccaacatggtgaaaccccgtctctactaaaaatgcaaaaaattagccgggcgtggtggcgagtgcctgtaatcccagctactcgggaggctgaggcagagaattgcttgaacccgggaggcagaggttgcagtgagccgagatcgcaccactgcactccagcctgggtgacagagtgagactctgtctcaaaacaaaaaacaaaaaatagccagtgctgttctggatgggtcaacttgatcaataaatcagtgagaaccaagttgagatgaggctctgttacctgcttcagaagagaaagccgccctcactgaccctttgctcatcttctctgtctgtgctttcgtagattgtcctccagtcagtgactacgtggtcctcaacgtcaccagtgacagttttcaagtatcctggcgtttaaattctacacagaaccacactttccatgtccgggtttaccggggtatggagttgctcaggagcgccaggacacagagccaggcactggcagtggctgggctggaggctggagtgctgtacagggtgaagaccagctaccaggggtgcggggccgacgtctccaccacgctgaccatcaaaaccagtaaggcccccagtcagagacccacgttagcttgcgagcttgtctttctatcccaggtctgtggccctagcatgtcgcgttcttcttcctataaccagggcaccagaagtcactgaccgccctgcacttcctccctcccctcccagtcatcccactgcctgcccggcattgcaccggcccgctggtgccttcactggctccctcgcttccctacatgtcgtcctgttaggggttcgttctgccgtgtgaggggacaacatgtggactcagaagcaccaataaggcatcagctagggtgaagcaaaggaacaaaataataataataaagcagaaggcggcagctcctggcaggcagatccggaccctgcccgcttacccagcagcactgaggccgtctaagttccctccccgagaggggagcatcgctgacgttttcacgccttgcttcactcatgatgcatgtaaagcgaatgccatgcccaccacattggtgctgggacaaaacgttttttctttttgagacagggtctcgctctgtcacccaggctggagtgtagtggtatgatcacagctcgctgcggcctcgaccccctggactcaagtgatcctgccacctcagcctccctagtagctgggaccacaggcacacaccaccacaccaggctaaattttttatttttcataaggatggagtcttgccatgttgctcaggctggtgtcaaactcctgggctcaagtgatctcaggaggcaacttttgtctccaaaacacacacgacacacacatgaacttggggcttgtgtcaggaaggcagccggtgtggcccatctgggtctgtcccgggcagcccacttggctctgcccgtgtcttgctccccacttgcctggtgcccgtggtgcctagacttggtcagatgaggcctggctggtggaagttctcccccaggctggcatctgtggctgtggggtgtgaatgtggggttgctggggctccattctggttctgggttccgatgtgtgtccctgacgtagagccagtgggagccctgggctgtgggctttgggcttcatgtctcagcagagcgtacagagcatacaagttgctgcatgaagaccatactggggcctttctcactcacaggggttaatgctagtgacagtgagtggtggtggagaatgaatggcggaatgagcgaccttctgtggctcggccctacacccttttcaaactgatttggggcggacctcaagctaagtcctcatagcagccagcacgggcatccagaaagccctcaagcaccccggccaccctcgacacaagccctccactgtgcacgcggcatcccattccaagctgactccacctcatcttctcatttcatttccaaagtacaccaggactgaggggagggacactcttttccctttttggaaactgaggcctgagaggcagttccattacagaaccatcctccagggtacaaaattgatctctattgggaaatgcaataggaacttgcagctccctccccaccccagcaaccccgtgccctcctcaccctccccaccccagcaaccccatgccctcctcaccctccccaccccaccaaccctgtgccctcctcaccctccccaccccagcaaccccgtgccctcctcaccctccccaccccaccaaccccgtgccctcctcaccctccccaccccaccaaccccgtgccctcctcaccctccccacccaccaaccccatgccctcaccctccctacccaccaaccccgtgccttcaggaaaaaaaatacctgcattccaatgtcaggcacagataatttggaagactctagaagactctagaattaccaacctattccacttcccagccttgattttctttccttttccagattataaaaatgccctttttttgtagagcccttttttaaggagcccaatttgctttaaaggccttgtctaattccaccttgtcatgagcctgtgacaccgggaggcagcagggcaggtgttacggtggcagcggatgcccagagcctccagggagtccaattcccagggccctggaggaggccgccagtccacggggctctgcgatacgtcggggcctgagaatcggaggccacatggagtgctcctccctcttgctaagatgggagattcacaggggccccaactgggaaatatacaatatataacattggtggcatttctgtggccttaagtgtggcgtgcataggtgacacactctgatggcccgtagcttgccagctgggagagagccagggtggggcacagctgcaggtggctgttagataactagagaaacatgcagaattgccgccgacctgctcctgtgcccgccgacgcttgggttgtgcatgctgggtttcctttcagtaatgaaagatgaatattcccgtgtcccatcttgaagcttttttccatctttgcttatgccccaaaataacgcaacctcccttgtaagtaagcaaccctaccattttgactggcagagtacgttcttgagaagttggactttcagagctaaattctggaacctcccgggcaggttggaacccattggtcaccctgatgttgggggcctgagtaagggcctcgtcgtgtgagtacctcctgggccctgtggttgtgaatagggcaaaggaaggcagcagccaccccacgggaaaggaccctccatgctctggttgaatcccagttcccgtgggtatgggctgtgtgtgacgtttgtacctccttcctgggatgtctctgccctggacataaaagtgtttgtttattctctcgtttcttacatttatttcccccaattaggatacctcaatctaagattcatgcctcaatctattaaaaaaaattatcccgccaaagagtaggcttcatggaaaacattaacagacaagtgtgtgacttttgaccacaggctaatttgtttcactgtctgtctcagatgcccaggtatttgaagtcacaataaagattgtaaaccacaacctgacggagaagttactcaaccgcagcagtgtggagtaccaggacttttctagacaactgcttcacgaggtaaagccacaatgcagacagaaatcttttcttgggtgttctgagtgaggacatcaaacacaagccgttaattcctgcccagctcttcctctgggattgtggcaaaaatacatgttactgcagcttcaggggaggccaaacccaaatcgcacagtgattagtcaaaagctttccccctgcttttatggggtacttaatccagatactgggccaatccatctttaagatatgtgcctttattcaaatggtgtacaccacttactcctactgttggattttctgtggaaccttctgtctgagggccctggcttccagctatggggtagcttcattagtgaagcatttaccaacaatcatggcatccattcctccctcgtgactaaagggagacatcagcagacagccagggagaagcaagccagtgggaagcaccatctatccacagatggtgcattggagggagaagtgacttcctaaactgccaagaatcacataaagtctgaggttttaccctccctgcaaactaacaagtgagtctgccacagtttcatggatgctggcagaagacacgagactcctgggccagagacggaagactgtattactccagcacagcaggcagcatgcgtgtgctgctgtgccggttccccttcctgcacccgagtcccgcagaggtgatgcagaggggaccaggggcatgaagcacacaaagtgggtctgcacctgagctgaggaaccccaactctagggaacctgaatcttttataatgggtgcaagcactggctccagaaggagacattatctgttacatcagacagtaacaaacctgccctttgctctggagggagccaatatctctccctcccaaggctgttcactatgcaaacatccttggaaagatattctggaacaaaagggcagttagtgcgtctacttgcaagatgtgtagaaatgccagagacccacagagtgttgcttcccaacatttgcctggaggaggaatctggttttcaatgttttcagagaattccctcccttttgaaatgttaactcacttgtgtgtgcaagtatgggttggcacaaaggcagggaaccaggctggtatctcccttgcttgggcatgggtagccctaagcacctggctctgtgtgcgtgttttgtgtgggatacagcctagtaagaggggggacagctccaaatagccataggcattgttccttggtggggcctctccatctatcaatcaatcagtctttctcacacgctcacacaaatgaccttcgcaccagttttcaggacactcagaggggattgtccatctgatgctccacaactgggagcttgattgcagtggtcactgtgagtccccagcacacaccaggccaggcccggccgtcccagggaaagcccagctaaggtgctgtgaacggacttctctgcgtgctctgagaggtcggtcgtcaggtgcctcctcttgattgtagaggagagaaatggctccaagcaccatccatcggtcacacctggaaccctgcttaatggtcgtgaagacgttgatggatgtctgctgttgcctcttcttggctaggtcgagagctccttcccaccagtggtgtctgacttgtaccgaagtgggaagctgagaatgcagatcgtgtctctccaggcgggaagtgtggtcgtgaggctcaagctcaccgtgcaggaccccgggtttcccatgggcatctccacgctggcccccatactccagcccctgttggcaagcacagtgttccagattgaccggcaggggacacgcgtgcaaggtatggcccagccacccgccctgctgcctggtgtcctccagctcagaaatcctcttggtgactttatttgagtcagtctttcctttatttcaaagggtaaagaaatgcaaatccttattctatcttcctccaccggaaccaggggccagggcagtagccctgaataactagctcacctgtgtctcattggtcagcccaggacactgagtgaaatggggctggaaggtaccctcaggggaaagggacaggagttcactgtgtctgtcgtcagggccccccagcacttctgggcagcgggacaactgcccacctgtgggtctatttcttttctttttttcttttcttttttttctttttcttttcttttctttttttttttaagacagagtttcgctcttgttgcccaggctggagtgcaatggcacgatcttggctcactgcaacctccgcctcctaggttaaagtgattctcctgcctcagcttctccagtagctgggattataggcgcctgccaccacgcctggctaatttttgtattttaagtagagacagggtttcaccgtgttggtcaggctggtctcgaactcctgacctcaggtgatccacctgcctcagcctcccaaggtgctgggattacaggcgtgagccaccgcgcccggcctctgtgggtctatttcattacgctgtgtgttatttcattttacttggtgttgccttgaagcaggaggtcatggacacaggacagacacaaagagacagagagataaagagagagacagaaaggcacggagaccaggttcttgctgtcctgcagcaggcacggagttctctcctggctgtgagggcacacacagtctctagatccacaagctccagttttgggctcaatctgtggagtgggcacctctctggtcgtctcccggggtgctgggtcttggagctcagccacgtgctggcttcctgtcccaaccttcccccaccaggaggtgccgggaagaactgggttgggtgtggggggatctactctttgaagtcatgcctggaaacctcggcctggggttactctgttcacttggcactccctaaggatggggatactacagtggcccctgtacctggtaagatcccacctagctgggctgcagggtagggcctgaggttggggtccacagggtatgcccccagcagggtcctcagtgtgtgaccccgtgatccaaccttcaggcggatccagccttcaggtggatgccacccagcccgccctccacacctccctgcctccctcctcccatcctctgggactagggctcaggcgattccagatccctgccaaatgagaacctcggcagcagggatgtcgtgggtagaatggtggccccctccaaaaagatatgttcacctggaacttcagaatgtgaccttatttagaataagggtgtttgcagacacgattaagttaaggatgtcaagatgaggtcctcctgccgttggatttgggttggcctgaagttcagtgacaagtgttcttatacgagacaagaggaggagacacagacacagaggccaagattggagtgatgcagccacaagccaaaggactcctggagccacaagataagacactggaagaggcctgggaaagcccctttcctagagccccagagggagggcggccctgctgacacctggagtttggacttcgcctccggaacggcgggaatacatctgtgctgtttcaggccccccagctggtgtgtttgtgatggcagccacaggagacccgtgtcttgcacctctaggactggatgaatccattgtaagcattcgcagcaccccactccccacgctgttcagtggtcctgcagaagttattaagctccttctgcaggctcttgcccggcagggtcccgggcaggctgtggcctgcttcctccacatttcagagctgaggtgctggtgcgggcaggtctcctgagctggggggtcagctgtgtggccagtgatggtgacgcctcaggccgtgcatggccggggaggcggccctgcctctgcactcttttgactccatgactactggtgtcttcggacgccagagtcgggggagcaaccatggggcaccgcccctgcctggggaggcagcacgaggcctgagcccagcttacagggggacatccacccccgctgagagccccaccttcacggcgaggatctgtagaagaagacatttgatattactcggcaaaaaaaacaagaaacgaaaacacaaaaagagctcctctgaagaagaaaaggtatttgcgctgtggtccacctagaaataatgttgttggcacaactagagcattcctcagtcattcaggagcactccctgccggtgcgtccacatgtcccaaccccgatagatgaggcgctgttcgcccgtggaggggtcaggttgtcgtgaccttatctttacccttaggccgtccatcccggggcctggggtttcctgcgccagtcacggtgggctgtgtaggtggccatgtgttcggtctttccccaggaggtacgtaccatgtgctgggaggcctggaggctgagccgccccccgcgcctatgagttgcaccctcacagcggcggccaaacctcctgctcactttgccccataggaagaggttagagtgaggcggaacgggttggaatcccagctctgacactcactcactgtgggatgctgcacaaatgacttcctctccctgggcctcagtatactcatctgtggaatgagattacagcaacatcccacctcctatggcgatggagtaaattaaggcacaatgcctgtgtgggtttagcccagtgcctgtgcatggcgacagtgcatttctgatggcccctccagcgttcagggctaactcttccaggattaactttcatatcttggatgagagctcatctaggaaggtctcctagcaacccctgggttcccactggtccttccgcctcacggggctcctttttgaacccctcacatcatttccattcaatctcttgctcctaacagcacggcccctattccttctctttcccaacatctgctctcaggagagattctcatacagtgtgcatttgttctagagtgagggtcatcactgggcttctatgaggcaccgctgtgaaccctctgcaccgaccttagccagaggagcaggactcccaccggcatccttctgcgtaagaggccttgtgggtcttctggggctctggaatcaacgccgcttttcctggggccagagtaggtggagctgagctccccaaagcttccagtttgctgcctgctcccacccgcctcgccactgcgcgagccctttccatcccctctgcagagtgagagaagggccgtgagtgaggatcctggcctagggctgtcaccatccccctcacctgctggccaggctaacctactgcaggctgcttcctttccttaggttcacgggtaccgctatttgtccagcgtccatttgcggtggcattaggatgaggtgctctgtgccctctttctcccagtgtgaatctgacacacgcccccaggagagtccgaggggcatcacttctggaggacgccctgggccctgaaagacagctcatggtccaactgaggagcctgcaccttgctgggacagggtggcccaggagatctggggtctgtacctgctcctggaccctctccagcttgttgttctgggtggggccagctcaggaggggcacctgggctgggagtctctgaagcagctgcccccattgctccaggagagggctcagcccttgtcccagctgcggggccagtgggagcagtgtgcagcgtcctgccctgggctctcgctggctctgcgccctcgcctggccagcccgggagggtgcagaggctcactggcagctcttcctgctcccacacctgcctcttcctctgaactggagggccggcaagcctcaaggcttaatgcaagactaaatacagctgtcagcgccttcctctgagctcgcttgggagctgtctggggggacggaggagtgaagattaggtgaatcaccacgccccaaaatagacatcaggtgcttggtggtttgagccagcgtcttgcctggtgcctctgctgtcctccgtggactgcagcccagccagcctaggctccaaccccaacccggagcacccccaggagagttacctgtaggctggaggttgagtagcaccccaggaagaggtgtgggttggcaccagcagtgttctgatggcaaggcagcccccaggccatgctagggtggtggcatagctgttgtggcagctgacgagcttgctgttctccagggaagctgcttctgtggagaccgcaggaagcacaacagaaaaaaacccacaaaacgagcctcagagcactcagcagcagggttttctttgcccagaactgaactggtcctgcatcgtggcttaaattccacctgaattggaacttctctggcatgccgggtgtgggttcgttcccgagcacctccacccgcagctctacagaagcacgcgcagaaggcactgtcacctccagcagggcctggccctgacgacctcggctcagccaccccatgggagctacattgtccttgtcctcaccttcattcccctcaggcgggccccccggtgacatgacatcacaagtctttgggcacaggaggagggacatacctgtggagacacccgggtgctctagaatatggcgcgggaagttcatgttgtactccgctggaccccacccccggcgtgggaagttcatgttgtactcaggctgacccccaccccccccacgagagaagtccatgttatactcaggctgacccccactcctggcatgtaaagctggtgttatgctcagctggacccccacccccggtgtggaaagctcatgttatactccactggcccccacccccggcgtggaaagctggtgttatactccgctggacccccacccccggcgtggaaagctggtgttatactccgctggacccccaccccccatgcggaaagttcacgttatactcagctgtgtccccacccctggctcagttactttcctatttcttggttgagacactaagtattggagaatgttggcacatcaaagagagaggagaaaacatttcaagttttgggtgtggaaacagaataaagaagagagggctacatgcacacccatgggtgctaatatttaaggaatgaacatttcctaatctttgcccccaaataagccaaccaatgtgaaggtgggcacaggcaggccgtaaggttgtcatgagagtgttggacggatgccccaaaatgcccctgctcccggccgttcactgcaaagacggctaggaaggactccttccagcatgggtctgtcttctgatcactctttggctgttttctcatgggttttgattgtgtctccccctggcagactgggacgagtgtgtggacagcgcggaacacgactgctcaccggctgcctggtgcatcaacctggagggctcctacacctgccagtgccgtaccaccagggacgccaccccctcccgcgcaggccgggcctgtgagggtacgtgtcgacccccctgccgactctgggaagaccccctgcccgagaatctgggggtggggcaaagcccaattctccataggcacagggctgaggacctatggtaatgttaggggcctacagaaatgttttcatttcaatttattttaaaatcagaagaaagaaattaatagaaggatagtaaatatacataaaacaatgaatctagcttggattacactcatctctatctaaatgccattataaaatgtaatttttgatagattgttaagtggaggggtgcaggggtccatgaaggccaagttccttgggcccacagaagtcaggatgcagcccggggtcgagggattccttccccagtggcctggagcccgagagggtgtggcctggagcccgagacagtgtggaagcccagagaagctgcagagaggcccgatgggggccgctgagctctagtcctgctgtatcggcccccagtcttttctgtggaccagttctgatgagtgggtcggggatacctgggatgctgaattgagcagcaggaggaggccacgtagggacctaaaatgcagtgactgattagcaatgtcggcccggacacaggcgtggcagaggcgcccagccactggcttgccagcccctgctgagggctttctagctggaaggagcagccgagaccagttccctggggagaatattccttagacactgcgtgtgctgtcctgcttcctaacatcccacaccttgtcttctgtttttctcattcgcctaatgtcctgcaagtcgatgacagcatccagcaccaagtcccacattgagcacaaatctgggggaaattgtcccattttcccagagtcctgatggattaatctgaggcctatgagaaccaagccctgcattcaagcccgggttttgtagccccccgggtggatccctcaccctcaacttcagtttcctcatttatccagtggagaggcgtgatttgccttcagagagccccggggaggctgcaaacatgggcccaggaaacactcctgaacgctggcgcccgcctgcgtccctggccaggtccactccgggatgcagagcagtcctgctggacggccatgctgccctcctgggagggctcttactcgtgggtgggatccagcaggctctgacagtggatgtgtcttggcaggtgacctggtgagccccatgggcggtggactgtctgcggcaacaggggtaacggtcccaggtcttggcacgggaacagcagccctcggcctagagaacttcaccttgtcacccagtcctgggtaccctcagggcaccccggcagcaggccaggcctggaccccagagccctcacccagaagagggggcagcaatgtggtcgggtatgacaggaacaacacaggaaaaggcgtggagcaggaggtgcccagcactgccccgggtctggggatggaccaggggagccccagccaggtgaaccccagccaggggagccccagccaggggagcctcagacaggagagtaccagccaggcgagccccagccagaggagcaccagccaggggagccccagccaggtgaaccccagccagcggagcaccagccacgcgaactccagccaggggagccccagccaggggagccccagccaggagagccccagccaggggagcaccagccaggcgagccccagccataggaacactatcggggtgataggcaccacctcctccccgaaggctactgggtcaacccacagcttccctcctggggccacagatggcccactggccctccctggacagctacagggaaactccatcatggagccaccctcctggccttcccctactgaggaccccaccggccacttcctgtggcatgccacccgttccacccgggaaacacttctgaatcccacgtggctgcgaaatgaggacagtggaccctccggttctgtagacctgccattgacctccaccctcacagctctgaagacccccgcctgtggtgagttcctcgaatggtgcatggggactaggactaataggacccatagcctgtgtgagcctctggggcaaagctcctgcagccgtggagtcgcaggctgctagcaatgctcaggcggcatcctcatcttgtgcgtgtggaaacggaggcacccagcagctggtttctagttgagttaggaagacagcttggtccccttgcctgtcccagatctctcttccccatctcttagggctccctgtctgcagcagctggggcggaggtctgccttcaggagcaggctttgggccttacttgtcgcgttaggtgctggagccatcccctgaggtgttgcccacccccgctgtcctgcctcctagcagaactgtgtcccggccccgatcagtgtgatgacacccccacaacaactctgcaccctcccagtaatgctgcactcccatagctgttctgcacccctcagctgttccgtcaccctgccaagcattctgcagccctgcagctgctctgcacaccaaggtgtgctgcaccccagcttttctgcacccccggctcttctgtactcccagctgttctgcacctccccagctgttctgtatctccccagctgctctgtatctgcctagctgttctatatgccccagagattctgcatttccccagctgttctgcacccccagttgttctgcatctccccagttcttctgcacccccagctgttctgcatccccagctgttctgtatctgcccagctgctctgtatctccccagctgctctgtatctgtccagctgttctatatgccccagagattctgtatctccccagctgttctgcacccccagctgttctgtacccccagctgttttgtacctcccagctcttctgtatctccccagctcttctgtatctccccactgttctgcacctccataggtgttctgcacctccccagctgttttgtgccccctcagctgttctgcacccacagttctgtagttccccagctgttcttcaccccagatattgaacctctgcagatgctctggattgtcagctgttccgtacccccagttgtttttttaccccctaagtgttctgtacccccatctgctctacacatccagagttcctgcaccccccagctgttatgcacctctagtcataccgtaacccccagcaattccatgttacttgtagaagatttagccatcaccaaacccccaggtgacatctcaggagattcacagcaggaatctgtgcaggagttggatctcagccgtgacagccctgtgagcttgcagagctagcctgcctctggatttcatccaaatgagctgtcaaatgtgatcttcctcaatgcatttcctctgctaagcagcacaggctctaagactaaactcttagcccatgtaagtcagtattaccgagggacctggggtcttcctgtaagaatggctctctagccagcattgtcaccaatgtcaactcctagttggaccctgggtaaatccacccaggggtcaagagtagacagtccatctgaggcgccaccaagaacctgctcaagaggccttcattttggggagtccaggggcctcagggatgtatatgaaccatctgctgaaacaaaacaaaatcagaagccatttgctatcatcccaaggaggggcaaggatgcaggcccaggaagcccgggcttgggaggtttgtacaggatcctactcacccatcacctcggcggccatcacctgcaaatcgctcatgtccccatggtgatgaatttgatttttggcattgggcgaggcttcttttctcctagaaatggcttgattgtaattttggtgtttatattccacttcccagttcctgtctccattgggaggatcatggtctccaatgtgaccagcaccggcttccacctggcatgggaggcggatcttgctatggactccaccttccagctcactctgacttccatgtggagccctgctgtggtcctagagacctggaacacgagtgtgacactgtcggggctggagcctggggtcttgcacctggttgagatcatggccaaagcatgtgggaaagaaggtgccagagctcatctgaaagtgaggacaggtaatgggcttccatttgtttttaaagagaggaacaaaaagtatgaaaaagactttctgtgggttaaggcttaagagagctggatttgtttatgggctgctaggtgtcattgttcttctcagcttagggacatccggctggcttcagcaggcgtgcaatgacggccagacaggaggtggcttattcaggaaaaggcattaggcagcccacgggtatggaggcggcagcagagtgccatagactgcgcctggaaggctgcgggtgcggctcacccatgtcctccgggggaggcagcatggaaaatgcatgcggtgctcatctgttgagctgcatccactccctctgatctcaacagtcctacagaggacttggctttcaggaaggacatcaacagacaatcggcagtcacatggatgatctgtgagcagcctgccagagcctggggccacaaagtaaagaattgagcaataatgaatcaaacatagactccactgcgttccagctggacagtgacaatattacacatatttggatgaaattcctcttttcttttcattagcatcgctacctgggtattttcttatgtgtaccttacctgggtagtcaagagcgtgtctgatgttgcaagctggttttcacgccatgggcagcttcccaagcgttgatagcagtggtctgcacggtggggcgcacaccccttgagggaggtgtaggatggtttcacactgtgggcagcattgatagcagtggtctgcacagtggggcgcacaccccttgagagaggcataagatggtctattgggatgcaataatagaagttgagaactatgtatgtgctttaaagtactaatcagccatggcctgagaaattagagaacagatggagtgcatgacgtgaattgtgcacgttcacgagcagctggagaggagggagatcagtgctggctggacagtcagacagggtggctctggggtctgagagccagagttgggcctctgaaggtctcagctgctctggacgggacaggctgcacgggggaccccaaacctgtgggtgcacttatacctgctctcacctgtgcacctgtcctgctactgatggctttcagactgggttgctcatgccagccatggagactgaaccagaagccctcaggggcagcaacaacaatgatctcaaggacgtagagtttggggttcgcccaggaatgcatagcagaatggctctgtggtttgtcttaaacttagtgagaagctctggggagatggactctaagccccctgaggggagagctgtgtctttctccttcactgtctagaatgcctctggcgcatggcaggcgctttgcaaatatctggtgagggactgactgaacactggggtggctgccatgccagggccaggatgggatggcgacattcctggaccacatttatgtgccacatactcctagaagccctctgcggagggaaaagattcagatggaacagatgatgccaaaacagggactgcccatagaccaggggaggtggggctgctgggggaggaagaaggactggctccaaacaagacccctgggcaccctgtggccacgtggactctgagcagaggcctggccagggccctaagtcctgttatacctgggacagcccagtttgcacccgtagccctggcaaagttatttaatggtgcctccacatgcttcaagtcatgccagcttgctgggaaattgtctgaaccccagcatgggggaacggcagcaaggaaggaaggctatgtgtggtggggagacagttgcaggggcgagctggctctgtggcctctggaaggttctcccactgtgttcaggctgtgttctgtgtcctctggaatctgatgggctgtgtccctgagccctggcactattccttctttctagaacacgggttggctttggtgtgatgctcttcctggacatgaaaatacatttattaatattgaaatgttagtctgttatctaatacagcaccaattccaaatgtgcttatcctccatcctgcagcagcccggaagctcattggaaaggtcagaatcaaaaatgtcaggtactcagaatcctttcgcaacgcaagcagccaggagtatcgagatttcctagaactattcttcaggatggtgagttggtgatatcagcccttaattcctttcaggagggaaagggtggaaggctgatagaattctaggttaggcacggtggctcacccctgtaatcctagcactttgggaggcagaggcgggcagattgcctgagctcaggagttcaagaccagcctgggcaacatggcaaaaccccatctccaccaaaaaaaaaaaaaaaaaaaaaaatacaaaaaatgagcctgtcatggtggcgcatgtttgtgacctcagctactcagcaggctaaggcaggagaatctcttgaacccaggaggcagaggttgcagtaagccgagatcgtgccactgcactctagcctggacaacagagtgaaaccctgtgggaaaaaaaaaaaaagaattctagtctcatccaactaggaatttgacctataggtcctatgagctcctcatttctgaaggaagccaggacgttaagctctggcctgactccctgagtgtccctggatctgccccggcgaagacacggttagcagacaggaggcacaactcttcctctgctgcatccttacttcacacttcactttctgtccagtgaaacctgtttttcagttgtggaacctatgaagcagaaagtccctccacggttttttttttttaaacctgtaaaaaatgagatttatttcacagaccataaaatctacttttaaactgtacaattcagtggtttagactattttgcaaaattgtgcaaccatcactactaattccagaacattttcatcacccaaaaagaaaccttatacccattagaagtcactcgcagctgggcatggtggctcatgtctataatcctagcactttgggaggctgaggtgggtggatcgcctgaggtcaggagttctagactagcctggccaacatggcgaaaccccatctctactaaaaatacaaaaattagccggatgtggtggcgggtgcctgtaatccgaggtactcaggaggctgaggcaggagaatcgcttgaaaccaggaggcagaggttgcagtgagctgagatcttgccactgcactccagcctaggtgacagagcaagaccccatctcaaaaacagaaaaaaaaaagtcactccctctcgccacttcctccagctcctggtaatcacttatctgctttttgtctctatagatttgcccattgtggacatttcacagaaacagaatcatacaatatgtgactttttgtgtctggcttctttcagttaaaatgaggttttctggtttcatccacgtggcagcatgtgtcagcactggattccttgttatggctggggcataacccatgcagtctcatccattcattcaccgagcgcactgggcggctcccgccttctgtctgttataaatagtgctgcaatgcccctgcctcagagaaagttcttttcctgctctttcctgcattcctccctgccatcccctcagcattctccaggatgctatctgttaccatttagtgacatgccttcttgtggactttttgaggtatagggagtgcccttgtcataatctagtgattttgtttgcacggaatctcacattgtagatttcctgagtctgagctcagcacagagagggtttgacattgccacctagtggcctgtcgtggtaataccgtagcagggctgcaaaccccagcgcttcccccacagatgagaagattcgacagcctttgggaacggcctagctcattccctgctcctggtttgtgcattcaacagttgttgacggtttgattaataatgtgatttcattgataaggttaaatagtagttagaatattaaacaacaaacactgaatccttccacctggctcgagtggtcaaaagaggcagctccgtttccttcccgagtttcttgattaatctttcctctttgaaccatttcttcctttgcccatttttggggtgttgtttttctgtttgcctagaatttcaggacagcaaataattatacaacttaatcacagaagtaggatgttaagagaaatttcgggggtttcacttgctgataaccgcagacgtggatgtcaggaggtgttggctgcatggcttggtccctggctcttcaccacttcctagcaaggggcctggaagtttgcttagaggttggtttgaaatgcagctaaaagtcacattaatccaagactatgccagattcctctgagagaaagagagagggaagaactgattgtgaagatggtcacgacaacagtcatctactgagccaaccaagggcagctgtggtctccctggggtccacaggctctgagagggacaatggatctgttcaccttggtggcccagaagccgggaagtgagtccatgacccaggccttgagccatcgcacctgtgaggacaaaccctggaagtacccataggaggtttgcactgaggatgattgaagctcattataagattgtttgcctttctgagtgctttgaccatgatgggttagcatggaatcaatcatatagcgtgtggtgtgtgactgtgtccaaagagacagagtagaaagcagggcgttcgggggcaggaaccccctgtcctaatggggaagttggaaatgctcacaggaagcagtctggggagaggtagggaggaagaatgaaaggggacatgttctgcagtgccaggagcaaaagagctgttccagagaaggcagcgggaagtggtctccctccccacgaccctgcactcagccccctgccctcggtggctgcaaaccaggagtattaggttctagaagcccttgtgagcccccagcaaattttaagccccatgaggtagggtctctgcctgtgcccccaagtcccaccctcgccccacaggcatctttctgaagccgtttactggtttggggggggaaacaagggctcttctcatatcacagacactcccaggcgtttgtgctgggcttgaaaacacagcagacaggaaaggggcccagaaccaacctgtggcttttactttgtgccacgggccagccctgctgctgggcagactggcaggaggaaccgccttgagacgggcatctgtttcctctcagcgtggggacctcctcacatggcctctttccccgcaggtgcggggctccctgccagccaccatgtgtcagcacatggacgctggtggggtcaggatggaagtcgtcagcgtcaccaacggcagcatcgtggtggagtttcacttgctgataatcgcagatgtggatgtccaggaggtgtcagctgcatttctcaccgccttccagaccgtgcctctgctggaggtgatcagaggcgacaccttcatacagggtacgagaggctgggatggagcctctcccgtgttctggaaccagaggcagccagagggcagccaccacccttcgcttttgaaagatgtcgtgttgtgcccatgtggtccttcttcccccagaattagatgaagatgtgaaatagataggaccctgtctgtccctcttattgtgattataattgtgtaaaggttgaagtgttgaaaacatctttgggtgaacctgcagatccccaggggtgctgctttctttccgggtcgactgccccctcgctgcttgtttccatgggctgagggcagatgcatccctctctgcagccagactctcccccaagcatagttcccaaggagatcccagtaaagataattaacgagaaaagcagggagaaaaagacaattcagattcttttctcctatcatacttgaacataaatgatgaatggcttatagttacatgtatcagaaacaaaagactttttaaaaattggagattcatattaattttttgatttttagaataagaaggacttcctaaagaaaatacgatttttagaggaaaacgatgagatgctgactgcatgcagagataaatcaaaataaaggcaccattttaacgcaaagtaaacaaaaaatttttcaataatttggtgaagtgttagtatcccaaatatatagagagatcatacaaatagataaatattaagaacctgatggataaatgcacgaaagctctacacagacaaggtataaaagaagaaatatgaatgactaacaaagatgtggtaacccaagacatccccattagaatgcattgcactgtttgcccatcaaattgcaaacaaaaggtctctttactgctgacatgaatactggtgaaagtgtagtgaggcaggtgtttgcacagattgctggtggcagaaggatttgctcatgcttcctggaaaccagtttggtgacataaatcaaacgctttcaaagtggccatccacttggattctgaaatatcagctctacgactttgtcctaaggaatttgatctgtttggaccgtagtttaaatacaaagatgttcatcttcagtgttactttaaaagccaaagagttggaaatcaccaatcatccagtaacaaagaaggtgctaagttaccaggtgtccccgccccgggctgttatgcaatgatgagaatagcggtttgtggatttgcatggagctagttggtggcagaggcaagctatgctctcagagcatgcctgcattttaaaaggctggaaggaaatacgtccacatgctaacttgcccctggccacgcttttctggttcttatccatgttctgcagtaaacctgttttgctgtcaacaatcaacccagcatcatggcgaaaggcaaatggcctgagggccttctgcccagggttgggcttgcagcctgggtcccttgggctggaccgaggtggatctgggggcctgtgcatctcctggttactcccgggaactgaagggatggccctgctctgcccagatccccctcccagccctgggccagaatcctccttccagaacagcccctgcagacatacttagccattcccagccccagcttcaggaagcctcctgtactttccagaactggtgagcttgactgcagtctgctgtggctggagtttccagctttgtctgtgagatgcactctcccccaaccaggctgctgtgagaccacaagcccccagggatgttcttctgttttgtcttctaaatgttgtgcagattacgatgagtgtgaaaggaaggaggacgactgtgtgccggggacatcctgtcgaaacaccctcgggtctttcacttgtagctgcgagggaggagcccccgacttccctgtggaatattctgagagaccctgtgaaggtaatgtcgtcagagtttcttcttctggaatactgtatcataatcggttttttttaaggacattcacgtgcaaagggcttcttgtccctctgaggtcatatttttatgtcctggggaagtttcctgtgtgtgatgtgggtgcacgtgtgtgtgtgtgtgtgtgatgtatgtgtacatgtgtgtacgtgtgtgcatgttccttcccattctttcatatgtgtccaggcttctgggcagtgccttatctctccaagtgctagctctgatatccatggagagaaaatatacacatacatgaggtgtgaacgtgcagatgctgagcgaccgtcttgtgaaacacgcagccgtgggacacgcgacacaggggaatgtttcctcttggccactctttccacccagctcttttcctgctaaacggggtcttagtggatttaacactgaccccacgttggccactgctatccaggaatctgcgtcaagtgaagggaggtgggcatttataccagtgagtgtggtatccggggggctatagaacgtgtcctgcttgaggtagaatcaggaagcacagaggaggctaagttgcttcagtccagtgagtgtggccagggagggcttcctggaagtggtgtcttgaagctggtcttaatggatagctaagatggcacccagcagggagggcagggcatggtgggtgggtgccgtggtgagaacagagctggtgatgggcgtgatctcacatgcagggacctgcaggagatgggtggcagagagcgagaagcaggctgcccagggaggcgggtgaggcagcagccaactgtgaagtcctcagcaatggtttggactatggcccagagacaggagtgagctgggtggagctgcagggtgctggggctgggcaagccccactctgagataaaagaaggcacaaaccaggcccacagatgatggagccactgctgaaggagggtggagggcacgtgcggagctgtgtctggggtctgcttccatatagaccaccccgagaacaggtgggtggattggaaagctttccgggccccttgttctcctaggcattgaaactgaacctgctctgggggcaagaagggagctggagtgggaagtttgggcacaaggacctcaagaggaggcatcattaccccatcttagagaatagactcagggctctcagggcagaagactcaccctgtatccactggcttggcacatccccggcatcaggtccctcggtccttggccctcgggggcccatggtgagcctggatccctgagctggtggaaatgtgcaacatgtgcatgtgtgcgtgtgtgtgtgtctgcacgtgtgtgcgtgcgtgtgtgcatgtgtgtgcatgtgtgtgcatctctgcgtgcatgtgtgtgcatgcacgtgtgtgtacgtgtgtgtgcatatgtgtgcgtgtgtgtgtgtgtgtgtgcacgtgtgtagttgtggctggaacatgcggttcccaggtgtggctgctgcagagtgcagggcagctccagtctgctccttacccctgcccctccatgccaaccccaaacacagagccactctttgccttttcctccttgtgccttgcaggtgactctcctggcaatgaaacctgggccaccagcccagagaggcctctcaccacagcagggaccaaggctgcctttgtgcaaggcaccagccccaccccccaaggcctgccccagcggctgaacctgaccggagcagtcagggtgctctgtgagatcgagaaggtggttgtcgccatccagaagcgcttcctgcagcaggaatccatccccgagtcctcgttgtacctcagccacccctcctgcaacgtgagccacagcaatggcacacacgtgctcctggaggccggctggagcgagtgtgggaccctcatgcagagcgtaagaccaggagagccaggctcaggatgtacactagggcgcaaggggctctaggttacatgggcctcgatgtgggagggccaggcaagactctgcaccccgaggggaacccagcaaggggggttcaggacagggttgagttctcaaccagggaccagcctgcaccccagaatcggaagggagctgtgagtccacccaggagggactctggtgcagagtgctggggcaggcttcagagtcacggcttaaaactcctccctgcacagacaggatgagaggcagtgggacaggaagaggcaggaaagccaaggagtcctgtgtgatatgagagtgtgtgtgtgtgagtgtacgtgtgtgcatgtgtgcatgtgtctgaatatgtctgtgtatgtgggggtgtgcatgtgtgtgaatgtgtgtaaatgtgtgaatctgtgtgtgcgaatgtgtatgtgtatatgcatggctgtgcttatatgtacgtgcgtgtgtgtgtgcatgtgtatcgcgtgcttgtgtgcgtgtgggtgtgcatgcatgtatgaatgtgtgagtgtgtgaatgtgagaatgtgtctatgtgcatgtgtgcatgtgtgcgtgagttgagcatgtgtggatgcgtttgtccatgtgtgagtgtgtatgtatgggtgtgtgtttggggggcattggatggcattagtcagaactgctctgtcggagggactgtgttcctagcgaacattctctatttcagggtcctggatgggctgtggggctcccgggacagagggagcccaggtggggaaagtgggttttcctggcctgaggccttcgcacctctgtgtgcacagatgggctctggcacctccccttgcaggtgactctgggccagtgcgtcctgggtctactctgagcctctagtgtgtggcacccatgaggtagctgacctggctccaggtcctgcttcttcccagggtgcctctgtgtcacagcgaacgctcccatgcaggcccttgttcgtctccaaccccacttggccacatggagcacaaaggcttcgtgttcagggccctgcttgggggacaagaggaggggagagccagcaccttccaccagctcagcctggtactggacacaggggcctgggccgcatgggcctgggagtgcagggtggatcagggaagctgcctggaggggccggcggcttcagagggagcccgtgccggctctgggttggggaagtggccttctgggaaggggctcgacctagaaaggaggccagcgtcgttccaagggtgagtgagagagctgtgaatgtatccaagggccatgccgggggtggctagatgagggaggctggaaaccatggcggagttaagagtctgtccgagtggttctggtcaggtgggcagggatggaagggtggacactcatgggcagggtggggtatgaggcctggtgggaaagtggggctgtggatggggctgagcagggagcagtgcctggcctaggagccagggccagaaggctctcctaatggggacattgtcctcatcgggagctaggcaggaatggtggttcctggtcgttggcgggaactctgggccctgggcttctgtccctcaggacctttgagcagtccaaggcattgcattctaaaaaaagggattggttggggtggtgccctgaaaccaccgtggacctgcttggctgagagttctacatgcatgatgatgtttagtcccttagcgaccgcatgggtcaggcatcatcatccacgctctgcggctgagccctgggtgctcggcagggtccatgggagttcagggtcaaagtcaacctgacaccgagaagcagccccgtccctgtggctctgcctcttgaggagccttgagggggtgctgcttctggttgggggtctggacacactccttagtggggacagggcggcctctggcactggatgggtcaaagctgtcagatgaaacccagagtcctggcatggggtgtcaatgtctgggagccgacaaagtgggaaccgggtggacgtcctgagcaggaggctgggacatggaccttggggctgagtaaggagctagccctggggagcagaggccagaaagccccaggggctgagggatgaggtggggaggtggggcataaggtgattccatggtgtggagcctgcttggagcctggagctgggactgagggtggccaggaagctgagggattcacgtggacgcgtcggaggccattgcagagcacaagcttgcctgggaggcacagctcactctgccgagctcattccgccccctcgggggctcttcagatcctccctgggctgaaggagtaacctgcactgtttcaacagctacaaaaccttcctcacccttcagcccctcaaatggcacaacttaagcagaactgcccagaattagttttctccctcaaagcttcttagacggccacctggaggccgagcgttggcagcaggggggtgtctgcaagggggatgggcggtgatcagtggctcctgtggcttctcggcagtttccctggtgagggaggtctggggtgagaggtgcatgtgggccgggccacagcggcatcctcaagcctatgcagggctcttgcagggctgcggggccaagtggaggggctgagggtgcaggacagcctgcctggtgctcagatcgccacccacacagcggcagctccagtggagagacagcgcctcccaggactggggccctgggcagagcctgcagccggcagctccctctgtgtttttctgaaccagaccaatgcttggcttgattattaaatgcagcagggtttggggcatgttgaaagaaaagggaatttgtctctgatgactcacccagtccctgaaatccacaagagctcttgacggtttttgacacttgtcaaaaactaagtttcccagaaagacttatttgtgcagctgccacggaatccccacaggttcaggtgctgcctcctctggtcaatagggaatgagcagaggccgagcccttaggctcttaggcagtttatggttgggagaatcgccaggatctcgatgctgctggggagaggctttagagaagaacccccatccccccagcacctagagccgtggcccacagcagggcgtggggggccggctggggcctgggagctcctcatgctccgctttgtgctcagaacatgacgaacaccgtggtgaggaccacgctgaggaacgacctgtcccaggagggcatcatccaccacctgaagatcctgagccccatctactgcgccttccagaatgacctgctgacatcctccggcttcaccctggagtgggggtaagggagaaatgccccggctgccccacagccacgtgcctccagaccacctgcgctttgagagttctttagggtgtcaaccacttaaggacccttccttgagatggaatatacaaatgggtgtggcctggctgctccccaaattttgttccctcttcccactcagggctagccagagaaggccaaatatgtcccgtggccaatcccatgggatggccccacttccagtgagccactggcaggccgccacccaagcctccatcaggcaccactttttctataatggaccccccaccttccactgagtctccacctatacaactgagggaggcaacccctggaccagccagccctgaataaatggcctccaagtgctctcgtttggggttgagggggtcttctcgttcatttgcacgttcctctggagctgtgttttaggggagaagtgggaatgggaggggccacgataatgcgcctcctgaaacatgcctcctgcaagctgcttcctcttgcagggtttacaccatcatcgaggacctccacggcgctgggaattttgttaccgaaatgcagttgtttatcggagactctcccatacctcagaattatagcgtgtctgccagtgacgatgtcaggatcgaagtggggctctacaggcagaaaagcaacctcaaggtggtcctgacggagtgctgggcaaccccgtctagcaacgcccgggaccccatcaccttcagcttcattaacaacaggtagggctcaggagtgcaggcacccccatccagcaatgcctggggctttattaacaataggtagggctcaagaatgcagacatccccatccagcaatgcccagggcttcattaacaataggtagggctcaggagtgcaggcacccctgtccagcaatgcccagggcttcattaagaacaggtagggctcaagcaggcactgccattgcctggccttgctgtgtggccagctctgggctctgcaggatttccaggcgagtgctgtcatggacctgggttttggggaacaaatgaggtgcccggtcctcgacttccacggagcctgtggaatctgcgagtgtcgtcagatgtagtcgtgagtaaactcatctgagaacaaggacagcggggctcgctgacaagcaaggagtcccatttcctctcttctcagctgccctgtgcccaacacatacaccaacgtgattgagaacggcaactccaataaggcccagttcaagctgaggatcttttcctttatcaacgactccatcgtctacctgcactgcaaactccgcgtctgcatggaatcccccggagccacgtgcaaaatcgtaagtgttttttggttttctaaacgtttggttggattcacgttccttattgttacggttcgaggctctgttaataaaaacctagggctcgagtggctcggggccaacctctgggaggagtcgctgtgcctgtcctgcagactccgcgtctgaaatggtatttccacggcaggcagcccttggacggaggactcatgtggactggtgggcatttcccatttctcaatggctgagctgagttccttcttgaggccataatattcaaccggctgtcgcgtcagcactgccttgccatgatacctagtgcttctaaggtgatttataggtgtaaaaatattttttaaatattatttttaacaacattgatggaacatactaaatatcagacactctgttatttaataaagttttttcccctttcctttgttcaacaatcatgcagggataattttacattcctgttttccttagatttttgaatttgaaatatgctttgtaatcctgaggtttgaaaactgtgctttatatcacagacaagtacatgaggttcccacatgttggtcgcctgttgtctgaggcaggggacagcttagggagctccgctgctttttgctcagtgaccgaatgcttctctctcctcggaggtagtgcttgttcctgctctcatctgagctgttttcctgggtgaccaagctctgagcgtctgcaggacgtggatagagaagcaacacaaggaaggctgattctgttcatgtctgttttgctcaaacactagatcttcctgagcaatgggacagaaggaacctcaggtcctaatgacagcaggctgagggccacacacgaggagcctgcccctggttccactggagcctcagagatgacaggagcacggacagccaccgccaggcttcgtctctgcagggagcggctggctctcaagttctctacaagagaattctttacaagaggagcggcacacagtgtgtttttcaagctcctttaggatggatagatagtgtatgagctttccgggctgctgtaggaacgtaccacaaactgagcggcttaaacagtggaaacttattgtctctgttctggaggcaggaagtccaagatggaggtgtcagccggctggttccctctgagagttctaaaggaaggatctgtcccaggcctctctcccagcttctggtggcctcgggcgttccttggctggtagacggcatttgccctgtctctcggtgttgccttccctcagtacacatctatgtttgtgtccaaatttcccctttacagagggacaccagccatagtggattagggcccaccctgatgacctcagcttgatgatctgtttccaagtaaggtcacatgcacaggtgctgggatttaggacttcaatccctttttggaggacatgttgcagcccatctcaggcatctagtgagcagatcccaccatgtcactgagccaggcagtcttttttgtaaggcaaaggtgtaaaggggaacaaatggctgcagcaacctttggagaacacagagggactctgagggctgtgaccaagacacagtcctcaagggacccaaggaagcagctctagcaaccaaaagcagctcaaggggtcttctccagcctgctgctcttgcagacctcacttccttccccgctgacgcctgggcctgcctcttgttgcaccaggacccaccaccctggtctcaccaggtctcccactcctctgtctaaactcagcccccttgccttgcaacttctagcaggataaaatcgcatacatcacattagcatccttgatagtagctcctttctcataaatgttgttcaattaatttgacgtttctcttcttggaaaaaaaaaaacagaattgcaataactttcggttgctgcaaaatagtgaaacctctgccacacaccagatgtcctggggacccctcatccggtctgaaggtgagttgatgacttggtttagacaatgaaagaaaagatgcaaccgattccttttcaccagcatgtaaataaaaaagtaactgttgtgaaatgcagaactcttgagagacttctaagaggcttatcataacagaaatactcatagttagtattcactgagagctgctacgtgtcagcctggcactaagttctttacatgcagaatgtaatatgctcctctcagcaaccctatggagcatgagctattaccatacccatgctacagatgaaaagactgaggcttcaagaggccaggcacaaagttacataatgaaatgttttgagctgcataatatcaagctggtgaagttttctgacactgggtaaatacatccagtgggctgttaagagataagaactcaagctataatcaggccatgtcaacgtgtgtgtgtgtgtgtgtgtgtgtgcgtgcacacgaatgtgcatgcacaaggaaaagctattttattcaaaagatgcaaaaaatggcatatctgttccccctcagtttaaaacttccattagccaattacattgcatgtattttcaaaaccccacatcaactttccagaaaaacattttattttctatatggtccatcatcttattttgaaaaaaaaatacattggtttggggaaaattgtgtgctttgggtattaagagagaaaccgctagttgtcccgtagtatctgttctcctcccctttcatagaaatagcgtccccaggttttgctggtacatggctgccaggaataaaaactgtaattccaacctcctggcagctaagtgtggccatgtaagttctgaccaatgacacgtaagtggaaaagtcatgtgacaacttttagaggtgcaccctccttaaaagacgtctgtgcctaccctctgcctctttcttctttagggctgtggggcccagtccttggagggatctggcttcccaggacaccatgggcaagtggccaaggcaggcctgggttctgacctccacttttttttttttttttttgagacggagtttttctctgtcgcccaggctggagtgcagtggtgcgatctcagctcactgcaagctctgcctcctgggttcacaccattctcctgcttcctactcagtcccgagtaacagggactatgggcacccaccgccacgcccggctaattttttgtatctttagtagagacggagtttcactgtgttagccaggatggtctcgatctcctgacctcatgatttgcccacctcggcctcccaaagtgctaggattacaggcatgagccactgctcccggactgactcccacttttatgacagaaggaaagaaacttccatgtcctttaagccactgctattttgatttttttctcttgcttgctgctgagcctaatcctagttggttttcctttttttgttgtttttttccctaatcttgatgaccctctcccttctctgtctttccctgtatgagaacttctggggtttggatgcagggtgtgagccagaatctgaatgctgctcaggtcttggccatgaagctggggaacaggaggagggaggtctcggccatgaagctggggaacaggaggagggaggtctcggccatgaagctggggaacaggaggagggaggtctcagccatgaagctggggaacaggaggagggaggtctcagccatgaagctggggaacaggaggagggaggtctcggccatgaagctggggaacaggaggagggaggtctcggccatgaagctggggagcaggaggagggaggtctcggccatgaagctggggaacaggaggagggaggtcttggccatgaagctggggaacaggagggaggtcttggccagtgactcaactgctggttctcatttaaagcatttgggaaactaaaaaagtagacacaggtcccaggccacaccccaggcctacacacagaatctctagagttgggtcccaggcccctgagctggtcatcaggtgactgttggtcaaggtgctgggacaacctgcttctcctcactcttcattttcttaatttcctgggaagaacgggtcagcctatttctttcaccctataagaaatagcatatgtgtgaaatatgttctcattaatagataatgtgttctttcatgaatagaaattaaacttcctccttcattcattgatatcatagggaatgtcatgactagggggtgaaaagcactagacttggacttgggacacctgaatttgattataggctctgacacttatgagctgtatggttcatccatcatccacccatacatctatctcatctttccatctatcatttttccgtccatccatccatctacccattcattcatctatccatctatcatccatccatccattcatccctccactcatctatcatccatccatccatctatccattggtcatccatctatccacccattcattcatctattcatctatcatccatccatccatgcactcatctatcatccatccatccatgtatccattgttcatccatccatccacccattccttcatccatctatcaaccatccatcatccatccatccactcatccaaccatacattcatctgtcatccatccatccattcaactatcatccatctatccaccatcatccatctatcatcatccattcgtccatctatcattcatccttctgtcatcccttcattcatccatccatccatctattcatccatccatcctccatcatccatccatctgttcattaatccatccacccacccatccatccatctatccatccacccatttattcattaattcattcatctactatgtttcagatactctgatttttctttgcaacatgccctccctacctcataaggttgttgtgagtgtctaatggtaactaagaattctttgtgaggctaagatttgtgaggttgaaactaggctccctggattcacaacttggctctggcacttaataattttgtggctttgtgcatgctgcatatgaattgtgccttattttcctcatctttgaaaagggaataataataattcctacttcataaagagcctggcccatagaagttattgaataagtgctacttttcacttgtaaccagtagagcactacactggcataaccaaagcaggaagcacggaatgtaataagggtgtaatttctcacgttcaagaacaaggactgtaaatattcatgttgttcaacattctttctcattgtgttagtagcttttgtttgatctatgactatcatacaaatacacagcaaaatcatttagacacatggaatctcccagttggtggggacttggctgcattttaatagtgtatattaacagaaacactgttggagactgcagagatgagaggaggctggcagacaggttcctcaggacctcaccgctatccgcggcctctgagatcccacgctctgtccctgccatcaccatcacctccgtttcagggaagaaatgagaacaactcagagattttagggaatgtgcctaagctcacacagctggtacctgcacgagctgggcctgcgagtgcagatccaggctgctcataacccactctcctctctctgtctcctggggactgagctggcttcattttgaggcttccctccaccccagccctcacatcacactcacgatgtcttggcaccaccacaacaaagtcccacagcctgggtggcttgaacaacagaaatctgttctctctcagttctggaggccagaagtccaaaatcaaggtgctggcaaagccacagtctctcgcaacattgtagggccaagtcctcccttgccgcttcctcgtttctgctggatgtgcccaatctttggtggaccttggcttgcagctgcctccctccagtctctgcccccgtctgcacatggccttctttttataaggacaccagtcatgttggactaggggcctatctacctgcttaactagttgcacctgcaacagttccatttccaaataaggccatgccccacagtactaagggttaggatttcaatatatctgttttttgttttgttttgttttgttttgttttgtttcgttttgttttgtttgagacagagtctcactctattgccaggctggagtgcagtggcatgatctcggctcactgcaacatctgcctcctaggttcaagcgattctcctgtctcggcctctagagtagctggggctgcaggtgttgtgggccaccacgccaagctaatttttgtattttcagtagagatggagtttcaccatgttggccaggatggtctcgatctcctgacctcatgatctacccacctcagcctcccaaagtgtcaacatatctgtttttgcagggggtgaggggttcacagttcaacacataggtaaccctgtatattgacaatttaagaaagaatccattcgggcatcttccctgaatgtctgccaccaacaaatagtacatcagcatgataatttttgcatattcagttttcggaactcctccatggcctttcttttcctagctggcccacttatttcacattcatgagcatgtccctgtgctaaaaggccaagaaatttcgaggatagtgtccagggagtgctcaatgtcccagcaggaagggcctggagcaattactgtagctgctcagcagtgaggagactgaggcggtggctgagctggaactcaaacccctggaagggccctgtttcctctgaacgcgggttcttttttaattttttaatttttaaaattagttaattaatttatttatttttgagacagagtctcgctctgttgcccaggctggagtgcagtggtgcgatctcggctcactgcagcttctgcctcctgggttcaagtgattctcctgcctcagcctcctgagtagctgggactacaggcgcgcactaccaagtctggctattttttttttttttatatttttttagtagagacgggggttttaccatgttggccaggatggtcttgatctcctgaccttgtgatccgcccgcctcagcctcccaaggttctgggattataggcgtgagccaccttgcctggcaattttttattttactttaagttctgggatacatgtgcagaacgtgcaggttgttacataggtgtacatgtgccacggtggtttgctgcacccatcaacccatcatctaggttttaagcctcacatgccttcttccctttccctcactgggttatatccccctttacaaaagcagccattgctgaatttcagccgtcatttaaatttcccccgcatcgtggactgacatgtggtccaacggtcacgatgcatacacagctcatgccacacgcatggagcctccctgaacagggagatagatgccctgtttggcaggatgcctcaccagtggctgtgggaaattaccatccacagttttcagggcttgctctccacttctagctaatctggccatggggagtaaccattcctggactttggtgtcagtcagtgggcagcactggcctgtggaccccctgtggccagccctgagctagtggttcagttcggagcacacagctgcaggtcacagaaacctagctggagaggtggcaactgaacagggatgggtctttcccagggctgagagtccagggccattccgggctgcaaagggccagcaggagcgggtctccttggtctttctactctgcatcctcagggcggcacccccccttgtgctggcaaggtggcccgtcactcgaggcccaggaggaaggtccactacagagcccctgggggctggatttagtgtccatcgtgatttaggagttgtctggggaagtggccggccgggatctgggggcctcggtttcttggggagggtggagtcactttggctggagggtgggaggtgttccctgtccctctctctggaggagggatggtgtggttctagctggcttatgttcagcaccccagggatccgacagtgccattgttggatggctttgctgatggtgacgctccatgctgttccctgggggacacacagcagcgtccactctgggcagactgcccggaaatcaatacagggaatgaaaatgggatctcagatgctcctggttgcacagaaaggctgtttccaatgcagaccttcctgatatgtggggatgaacaccctgagatggaggggactgggtggtgcaggatgtggctgtgacctggctatagacgcccttgacaacgaattatacccacacacggtgggcagagggtcacatctccccctgggctcataggggccagccagagagccagcaggcagctggcatctttctcaggcagcacagtttttaaaaaattaaactgagatgaaattcacgtaacctcaagctaactgtgttagagtaaacgactcagtggtgtttagtacattgagagtgttttatagccaccaactccatgtagtttcaaaacattttcctcaccctaaatgcaacttcatacgcatgagtccctccccatccaccttccccctgtctctgaaagtcactcgtttgctttctgttcagttccgggtagttcctatgaacagggtcatgttattggtgcctcttgggcctggcttccttcactcagtgctttcactcagcgtgacatcttcaaggttcatttacgttgcagtgggtcagcgctttactcctttcacggttgggtcatgttccattgcacggtggggccacaatgtatggattcattcacctgttggtggacacttcagttgttgccaccctttggctggtgctgtgaacaggggtgtacaaatagctgtttgaatcagttttcacatcttttagggtccgcactctgtttttctttttttttgtttcttgtttttttgttttgttttgttttgttttttctttcttttttgagaccgagtcttgctctgtaaccagtctggagtacagtggcacgatctcagctcactgtaacctccgcctcctgtgttcaagtgattctcctgcctcagcctcccgagtagctgggactacagacatgcgccaccatgcccggctaatttttgtatttttagtagagacggggtttcaccatgtgggccaggatggtctcaatctcttgaccttgtgacccgcccgcctcagccccgcaaagtgctgagattacagtcgtcagccactgcgcccagcctgcactctctattttttaattgctcctctgggtctggggatggctcattcctctgtgttgtggagcctgtgtaggcccaacccgtgtgtccatgcagggaatctgactgggctctccccctcccaccaggaggacctgctggtcccgcgcagccccaccctcaaggcccaggcctccccaggctgcgctgtccttactgcaatgctgtcctgggcttggacaccttcctcagctttggtaacccacaggcacacgggtgcacacgtgggccttgcattccccgtgcttcagatccatcagccccggatccgggtggagggcttgctctatcgcattcctcccgtttgtgcagatctctcacctgtgcctgtctcctccccgaggtgagcctcctcatgcagaagcaggcctgggtgccggttatgtggtccttattgtggtggccatcttcgtgctggtggcgggaacagccacccttctgatcgtgcgctaccagagaatgaatgggagatacaactttaaaatccagtccaacaacttcagctaccaggtgttctacgaataggaggcgcaggctgacaggaaggtgggtgcggagtggggtgggaggtgcaggctgacaggaaggtgggtgtggagtggggtgggaggtgcaggctgacaggagggtgggtgcggagtggggtgggaggtgtaggctgacaggaaggtgggtgtggagtggggtaggaggtgcaggctgataagaaggtgggtgcggagtgggggcatctgatgtgcatgtcctgccttgccatccatggtgatggggacggccagcaggattcagccaagggtagatatgtgtgtgtctgtgttttgtggccctttacggagcgtgcagcctcccttctgaaaaagcaaccaggagcaggcagagaggggaaactacaggtaggttggtgaaggttcgatcgcttcacacacccactggactggctccacgataccagcggcagtgctatatgggtgaccacaggacccaggggcccaccacaaatcccatctctgccacccactctcttgaccacccgggcaaggtcctgagcctcttggtgcctcggtttcatcatttgtaaaagaaaccatggtaacatttccggccacgtggagggtgtgagatttaaatgggaagatgcccaagaggccccgctatggggtctgacgccctcaattgctggtggatcctaacgatggtcctcggccgagtgtccctgaaacctggtgctcgtagggattgtcacgtgtggtgtggatgccacagtggaccccccacaccttgctgctcatgcccgcagccccgacttatgtatgaccttttgaggctgaagatgcttctctgatctgccctgtggacttttgtttttcctgggcctgcacatagttcaccacaaatgaatgacaagcattatggagggcagtatggttagtataaaccttcagtgggaaacaccaagactgggacttttgtaaagattttcagattttttttttttttgagatggagttttgctcttgttgcccaggttggagtgcagtggtgcgatcttggctcaccacaacctccacctcccaggttaaagcgattctcctgtctcagcctcctgagtagctgggattacaggcatgcgccaccacacccagctagttttgtatttttagtagatacagggtttctccatgttggtcaggctggtctccaactcctgacctcaggtgatccacccgtctcggcctctcaaagtgctgggattacaggcgtgagccaccgtgcccggccaaattttgagatttttctaaaaaaagaacatgcctgtaatcctagcacttttggaggccaaggcaggaggatcgcttaagcttaggagttccagaccagcctgggcaagatagaaagactccatctctacaaaaaatacaaaaataagccgggtgtggtggcacacacctgtggtcccagctacttgggaggctgaggtggaaggatcccttgagctcgagaggtggaggttgcagtgagccgagactgccccactacactccagaggggaaccctgcctcaaaaataaataaatactaataaaagaagaagagaagcaatcatgaggcttatctggcagcgtgtgagactgctgactccaaatgctgtaagggaagcatgcggcttcggcttctggggaggcctcaggaaacttacaatcatggcagaagaccaaggggaagcaggcacgtcttccatggctggagcaggaggaaggggttggggcaggtgctacagatgtttaatcaaccagatcttatgagagctctatcgtgagacagcaccaagaggatggtgctaaatcatttatgaaggatccgccccatgatccaaccacctcccaccaggccccacctttaatatggggatcacattgaacatgaaatttgggtggggacacagacccacaccatatcaactgcccaccctctcagccaacaggagaacaaggaaagacgagaggccaattttccctcgatgttttaatttcaaggagggggacatccagcatgacccagcaccgacccaccagatgtccttagaaagctagtgggatagtgttggcctcatcgctgggattcgcatcttaaatattaagtaaaaggcactgacatttcctcgtaactctatctagggaggtgactggtctctagcactggtcccgtctatgctgtaagggtcctgagaccccagaatactgcgcatgttagttaccaggagtcctggcaggagagacgggaaagacaaagctaacacaagcgtccccctcacatgggcagaatcacttccacaagcgggtggcgttttctttgaagttgcccagcaagggcagcatggaggttgccttttggaaacgtgtgctgtagtctgggctttgctggtgacctgggaggattggcttgagttctctgggccccatttcctcattttaagattggagccagtgtctactacactttgctgagttgtttcaaaaatctgttatctcaagaaaataaggacctgagcacaggaaagatgggctgggctggagaagctgcctgcccgacgaagagggggtgggctgatgttgacaatgtctgttgtttcccaacatccccgtgaggttgtgctgttattagcatcctgtgttatagatgggaatccagggcagaaagggatagacgtcccaggtcacgtggctaggaggtccagggcaagaagggataggtgtcccaggtcacgtggctaggaggtccagggcaggaagggatgtgtcccaggtcacgtggttgggaggtccagggcaggaagggataggcctcccaggtcacatggctgggaggtggccgagctggggctgcatgggatttccgtttggctctggggtcagctctcttagctaccaagcttagagcctttcttacactagtgttcacatgactgatggacccttagaacaatgccccttgcctttccccttcatcagagacccggagaatttgtattttagcagctgtgcaaggggatccacaattcttaattcttgcagtggggacaccaggtgtcccagttgagaggcagcaactgttgtggttacagggaaggagccttcccaggacccctgagcctccccgggaggcaggtgctgctgctcaattgtggtctgggtcctcagccacctccggggatcccaaaggggcagggaacaacagcgaagtttcagttcaactttacactctaatagtgaaaaataaggaagcttcctcagtttggtagcttttggcctctggtttggggcccatggggtttgggccatgaagaccccctcctcaccaaccccattgcctcccatcctgggcaggagacattgtcaataccagcccgccccctcttcgtcaggcaggcagcttccccagccaagcccgtcttccctgtgctcaggtccttattttcttgagataacagatttttgaaacaactcagcaaagtatagtagacactggctccaatcttaaaatgaggaaatggggcccagagaactcaagccaatcctcccaggtcaccagcaaagcccagactacagcacacgtttccaaaaggcaacctccatgctgcccttgctgggcaacttcagagaaaacaccacccgcctgtggatgtgattctgcccatgtgagggggatgcttgtgttagctttgtctttcccgtctctcctgccaggactcctggtaactaacatacgcagtattctggggtctcaggacccttacagcatagacagggccagtgctagaggccagtcacctccctagatagagttacgaggaaatgtcagtgccttttacttaatatttaagatgcgaatcccagcgatgaggccaacactatcccgctagctttctaaggaaatctggtgtattggtgctgggtcatgctggatgtccccttcctcgaaattaaaacatccgagggaaaactggcctcttgtctttctttgttctcccggggctcctgtctttcgaagtgagaactgtctcaccagttctaaagttcctgcagacatctgctctttgaaaaccatcagccaacccacccacccccaccaggtcgacccttgggcagccccactcagagatgttcccagagtcctggtgggttctccacggatggtgcaaaggtgcaggggccccagctgtgctcgtctggctcaggtatcttcaccagccacccccaccagttggcgtgtcaggagcatcgctcacctgagggcaggcacagccccatggtccccgttccactgggcactctgggagtggctgccttttcattaggggcttgatctgtccctctccagtaaacatagacgccatgtcctcgggttggtgtttcctccactacccctcctcctggggttttctgtattaactttacctttcctgcgtgcaagctgacccaggtgacctcttcctccacacaggtcgccgtgagtcaagctgcctccagaacctcagagcttccctggtgggctcccccgggatccccagtgtctctctgcacctccacccatccctcggttcttaactcttcaagccttaacggaggtctgctctgacgggtgggctctgccagagcccgggtgagcccagaaaggaagacagcagccaccgtctgtcccgaagaggcaggccgtcctgtaggtcctagaggagccacagcccaggggcagatgaaggggctgcggaagacgggggcagtcctgggggtgctgcggctacaccaccacccgcgcggcccccgcagcctagacctcccaggcctgtgaccctccacaccagccctcagaaccctcctgggcttgccctcccttggcgtccgtcaccctttggcaaatatagaatatttcacattctcagagagacccgaccgcgctcttgatgctctttcgaaaataggtcagtcttagaaatacactgctaatgttatttttagtggatgtttatgctgtttgacttttctcctgtgtaccaaggtattgcttttatttacacgacagcgactcaaaaggcactcgattaatgtgacaaccttttcaataagcagaaataacgtaggtacacatcactctttacatttttctaagcattttcacagccgtttcttcatataatccgaccacagtgggaggtgtgatttacccattacacaatgagaaaccagaggagccgatgagttacttaattgaggtcacagaatgaattagcaagaaaatggttctaaaatctaagtattttagtctagaattttctccattacatcatcctaagagataatgctctgtacttcatttgaaataaactggaattgtattagatagctcacacctgaaagtagagtgtttttcctcagtgaacttagaattataacatggccttagttttcaacccatgatactaattttgttgaatataattaattgtcattcatacagaacatttggggaaaggagtattttgatttactggatattctcagagtcagtaaagaatgacagtgggtaatatgtgtggatcacagattctgatcaagtagaatcaatcgcataagacactgaaatgtggctggttgtgctggatgctccatttgggatggtccatcacaggctcgctgagcatccaacgagggccggtgctgtgttgggcacgctggggaggccagaaacgcatctctggttcttcccaagtcatgtcccgctgttctgatgtcagctgaggagctttcacttgcctttcttggaagagcatgacacatattcagtaaaaccagctgttgagccccatgactgtgtggctctttggatttcagataaagtcattgacatatatttaaaaaccctgtctttcaaacttcatctacagttttcaagtaatttttttttttttgagacaaagtctcgctcttgttgtccaggcgggagtgcaatggcgtgacctcggctcactgcaacctccacctcccgtgttcaagcaattctcctgcctcagcctcctgagcagttgggattacaggctcctgccaacacgcctggctaatttttgtatttttagtagagatggggtttcaccatgttggccaggctggtctcgaacttctgacctcaggtgattcacctgcctcagcctctcaaagtgctgggattacaggcatgagccgctgcgcctggcctcatgtaatcttaatacatgtgccacgtctgttcatttgtgttttctgtaataatgaaaacttggtttcctgtcatcctacctcccccatccaagtctattcttcgacaaacacttcctgagcactcacagtgctccaggccctgagcttagcgctctgggcgaagtgatgagagggacagaccaagccctgccctcacagagcacacggtcttgtgggggagggagacgctgaagtcagatgatgacagccatggtaagtactgagagtgatgattgcatgtgtgctgtgagatgcccctgacctggtcccttcatccacccatctaaccatctaaccatctacccatccattcacccaccgacccaaccacccatttgtccacctgttcacacatccgctcgtctgtccatccatccacccacccacccatccacccattcacccatccatctgtctgttcatccatccaaccatccattcatctattcaaccatccatccattcatccactcaaccatttatcgatccattcatccaaccactcacccatgcattcacccactcatccacccctccatccatccatccacctccatccacccatccacccaaccatctgactgaccatccactcaaccatccatccatccatccatccatccacccacccatccatccacccatccatccatccatccatccatccaaccaaggaatgtgtattgagtcccagtttatatactgacatgaggaagacaagaaaaatgaggcagagtttttgccctcaagtattcacaatccatctgaagaaaaacccctgtggatactataatacgtgcagtaaatacagggaggcctctggtggaaggaagagagagaaacagaaaaatgcacgtctatgcatatggacttgtgcacctgttcccattacttcattggaagggctttgggatgctgctgtgtcatgactgctgtttaagaatattatcagcatgcatattgcttgcagcttaaaccctccgatcctagactgtttccactggcatggcttaagggattaaatccaaagtgtatggaaacagaaggaggaagggagggcccctgggtgacccttggatgtctgtagaagttgttcactgctctccagtgcagatgtcaccccagggttgtgcagtgcacaacctgtaaggccagacttcagggccttggagacttcccagaagatctcttaacagactgagtgggcaactcaaatcctcctgtctgtggaagcggggaaactgacatagacatattctatacaagcctcattataagccctccacaaatgattgttctcactgcgcagttgaggaaatggagacagcaacttttctgaagccaaacagctggccagtgaaggaactgcaattcaaaccaagctcattgggtgtaaagttcatgccaccctctgctttctgtgggggatgggaaggagggtctttgcaggctttagaactcagagtacctctgagatgtgggaagagggcttaggggttccccaaggccagtgggccttgggctcctggggttctgggtccctggaggttctcatgttcagacactattgggatctcaatcttcctggcccaggatcccaagctgtgaatcactggaaagtggaagatctgatggaggtggagggtctgatggaagagaatctgatggaggagggtctgatggaggtgaaggctctgatggaggagggtctgatggcgggggagggtctgatggaactggagaattactggggctttccatgggccctctggcccaggttgcatctctccatgctggccactagatggcgacattagctggagtccacgctggaaaccgaatgtcccctgagtttccgcagcaaccacatccctgggttctcttgtttgttctctttcactggatttgagcctcttgcgtgtctgaaattgttctgcagacctgcaggctccggggcacatgtgtgcaaaggtggtgccctggaggccctgtaaatagctcagaaagtgaggctggtcttcttcagagactgagtgattgcgaagtgcaggacaaatgagtctatgtgggggccacagcacggatgtccaccctcccatctggatttcccaagaatgggagacatcttttccctcccttcccgtttctgggaggacaggggcagatggacaggcgagtaagacaggtggcagggagccagcagccctaggagctggtgctggggaggcccaggtgagatccctgtggctcagaagaggacctctgcatgtggaagggacgcccgcaatgcccagtgacacctctctctattgtggagggtgacggagtctgctgaggtagccacataagcacctaaaccagaagtgagtatctaaaacggccttgcatgccataagtcatcagataagaggggctggacaggggctccccaagcctgtcctcagctgtgaccaggtggctagcaaccctctttagtttgagcacctgctttgtcccagagagggagtattaaatgtccgctgttcaccccccacgccccatctctgtccctcctggggaggaaggctgtggtgggagtcaaccctcgcatcccatctctgtccctcttggggaggagggctgtggtgggagtcaaccctcgcatcccatctctgtccctcttggggaggagggctgtggtgggagtcaccccccgcactgtgtctctgtccctcctggggaggagggctgaggttggagtcaccccctgcaccctgtgtctgtccctcctggggaggagggctgcagtgggagtcaatccccgcaccccgtctctgtccctcctggggaggagggctgtggtgggagtcaccccccgcaccctgtctctgtccctcctggggaggaggggtgcagtgggagtcaatccccgcatcccgtctctgtccctcctggggaggaggggtgcagtgggagtcccaagatgcaggctcctcccagttctctgctcacctgtgctgaggctctgcgatctgtggaatggggccgtgttgcaggctcttgtaaggatcagtgttgcccaccgagggcccagcacacaggctcctaaggtgacgaagcacacatcctgctgccaaagtcacagcagcagcggcgccctcagacgggcccgtgggcctcctccgcacagtgtcgggtgctgagtgcctcttgtgggctctgggcttcgcgtccagcactgccaaagttgcccaggtttcacgggaagctcgcggcaggccgggcccagcagccttccgggagaaggacactacgcatctgcggccctgcatgcccccaggagcccatgggctccagcacgggggtgggcaaggggcgagagtctggcccctcatctcctggcagatttcaaagtgtggtcagaaacatagctggactgggcaactggctgaagtggaagtcatcattcagctaatgaggcttgatcttttctccatcccctgctactgctggtgtctgtgctggcctggagctcaccccacctcacccgggcagagcaaaggcccttggctggcagatgctggagggtctgtaaacttgctggtgaatgcccggctgtggacacacagcagatgcctgtcaagggagaaggagccaaggagagccctggggattcccaagagctttagggtgtagggaaaatcgcccaggcaggctgattctgcgaggcttgtccctatagcaggagatggcctgtgcgaagtgggactcctgggaaggagcgatgaggactagagggaaggggcagcatgactccacaggctctcacaagggacacagcatggacatgcttctgcctggatgcccctctgagtcgacagagatccatgtgccctggcatcaaggtcaggcaggggagacgtgcagggagtggagtggacaccagaggggcaagcaccacggtgtggacaccgaggggagccatgggtcctgggggtggcctgggactggactgttgagtcttgggtgggcagaaatcgttcccctcatcaaggactgtagatcctcacttgcgacacccaggacaccaaagcgcttctgttactggataaaaggtcttgactgtgtgtcatccaggctctttgtgttgaacaaaaaattgaacagaatgcataaacaaagcaaaaaagaaggaagcgacgaaagacaaagcaacaaaataacagtaaataaagtgcaggtatattgaagctaaagtacacttcacagagtgggagcaggcttgagcaggtggctcaagagcccccattacaatgctctttagggtttttataaagctcaaataatctggtgacacccctaggcaccctttagaagcctccaattagtcagaccctatgaaggattggcctgtgaccaatcagaagctgaagtggaaacttctgtcttgttatcgctggagtgaggatgtggcccgtgtgctgcctaatcttgcctagaactggctgcacctgctgttcttttgcttatcccttaacccttggtcaccctaatccctattctcctgtctcagttctgatggaaagaaagtgacagatgacctggaggttcctaacccagggaatagctagagttcgcatcccacaaactagtgttagactgtgggaggctaagggtatgggctttgcggttgtgagagtttggaggttgaatctcagccctcctatgtggggcatgtcacccaatctctctgagcccctgtttcctcatatttaccccacctgtgaattgaagctgttgctagcattggttagggaactttgggcaacaagcaatggaaatgtcaactccaacagtctttaaggataaagtcaatttatgaccccttgcaagtgagaagtccaggccagggtggagctcaggtgtggcttgctcctgcagctctcaatggcccagattttgtctgccttttgctctgcgttccatggtattagtttaacccaaagctccctcttagctcccaaatggctgcgagcagtaatcaggactaattgctcatttgtgcatgtccagctgaagacagaacaggtcttcccccaactacggattaaaaggctgggttaggcggggcgcggtggctcacgcctataatcccagcactttgggaggctgaggcgggcggatcacgaggtcaggagttccagaccagtctggccaattggtgaaaccccatctctactaatgatacaaaaattagctgggcgtggtggcacgtgcgtataatcccagctactctggaggctgaggcaggagaatcgcttgaacctgggaggcggaggttgcagtgagccgaggtcatgccattgcactccagcctgggccacagagtgagacgagactcgtctcaaaataaataagtaaataaataaataaataaataaataaataaataaataaaattaaaaaaggttagcattatctcttgattgaaatgtcctacgtgattccccgactccgagcctgtcgctctggccaggaggatgttgggtgctcctgataggctgaggcctgggctatttgcagtgtcaaagggaaaggcctcatgctgttggttcattagtgagaagccacaggaaggtgacatgccagggaaagagactaggctctgtgttttgggttcacagcatgcaagcatgcacccaaacatggaggaggggacttgagtgtcttttgaatgggtctacactgatatttgcttctctgacctccgaaggctccatctcctaggacgttttccgggagccagggaaagcaggatagcagagcctggtcacgtagtgctttgagaatgcgctgggtgggcgagcggtgccttcttattgggttgttcttgtgaggagcattctgattcctacttagaagccctgaatgaaggtgggagcccctgacgatggcagaggcaggtatgtctagggtctgggggcacctggtgtcatctacttgagtcctctttgaactctgcatttggcagctgagcgataccgaggaagtcacttcccctcagcgtcaagcacctgtgctcatcctcaaaggggtcaatgacgcttaggtcacactctccagggcccagagctgctgagctgcacacatgtacgtttctccatgagaccatcttgggggacaagtgctggcacccccacatggtaggacaaagacagaggccttgagacattagtaacctgcctcagatcacacagctggggccagaccagagcccaggctgcccgcggtcatgtcctaggcaccatttctcataggcatcgttgagtgggagtctgggctaaacaagaccacactggttttgatgacggcattttctgcccctgtaccgcatggtaggccagggcctccctcccacctggctacgctgcgcctccaccttcactctcagtctctgtaaagacatgttttgagtgcttggggcagtcgctgagaatattaaagacataatacaggggcgtgcacgatgtggggccttggtacaggttggtacaggttggatccatgcctgccctggctctgggaccctcctccccaggatagagccaggacaggtggggagggggtcactacctggcatgatccgccaggagctggggcagagggacggagcctgcctggcaacagccatgatccaccaggggctgggcagagggatggagcctgcctggcaacagttccagggggggtccttactgggacttccccttcccaggaccgccagtcccccaaacacagcgggagccctggtcagggaggctggtaacctagggggaagccagcgctggagctctggctgaggatggagcaggcactctctgttcaaccctccaggaagccagcatcaccaggtggctggggtggcttctggcctccactgtctgcacgctgtaccctggagctgccttgggaaggtttcggctcctgcagctcccccacgccaatgcagacattggcctcattcagagcaggtccgctcttccccaggggcaggcccctctcatgcggcccgctttcactttatcggagtcacaatgatctgacctcctcctattgatcacgcacagcatttcctgggactgagtttaatttctaatatctgccccatcaggcccctcctgggcaatcctcttccttcctggaaggtacattaaactctgaggtttcacaagggctggctgcatccctgtgcaggcagacaggaccccacacacccaggcgagccctccttggcggcctgttcatctgcagggattcttccggttccccctctggacagccccacggcccagatgccttggcttcccagccacagatccctcattgacctcccctccttgctggggagaggcaggcgctgggtcatccatggggcatgaaagtgacagctacaccctccaagcccgctgggtccctctgccgggtgcctcccatacctgcccctctgcagttgagcaggtgagatctgctgggggaggaggtggccccaggatccctgtcgccgtcccggcctccccgctgccctgcactggctcctgggcttctccttggccctcagttccacggcttcctggctccagcctcctgcctggggctacccagggccgtcaggggcttagttgttccaggaggctgttgtacacagaaaacaccttcatggctgcttgaacatttaatatataatttattgaggttaatttaaaaaaacaattagttttccttaagtaaactcaattcatgaatcttatttatttgttttatattcatctgggagcttttggcaatctctttcagagggacttttgattaatgtttgaccaactcagttgaaaaaaaccctcatgaacagtcaattctgttaattaaattccctcagacatttacactgaacttagaaatttatttgattttctttttaagacacttcagctgcctgacccaagtacttcagaggactctgagaaaaccactgacacctttgtaaacaggcagctcccagagtccaggaaacattccaattctacttatatatctagtttgttttgctcacacctttcaatttagaatcactagtctgtagagaatggcacattttaaactagaatcagctgttctggggaataaactaggaaagtgtgtgctgtgggagcctctagtatgcctcattctcttacacactgtaaacactttcaaacacatacacagactgtttcagaacacagcaggaaagtattaatatgataggtttgatttacttcatcatctgcaaacaatggtaaaccttcctggagttgaagtgctttctccactgtggaagcaatttcctgtagcaagaatggggttactttctctaagtgtgcgtgatttcggtctgggcttgagacctgggatcataggccttctggatgattctgtgatgccactgatgagaactttggaagctgccctgacacagacctccacatcctccagaggggccagtctcccaggcatgacctggttcagataaatcattcccggatccttccatcagattagtctgtgcccattgcccggtgacttcaccactgattagattcaatgtttctgcttcttctcgagttattttcaagctcttctgaactggagaagtacaactgattagattcaacttctctgcttctctttcaagttattttcaagctcttctgaactgcaggggtacaactctcacaggcagagtctccatgtcttttgtgctctgcccagctaggtggttcctgggctgtgatgctgcctggtgctctgggctgccccttgatctgtttctgatttagcatctggctctagctcctccactgtggtcctggccctacctgtgctcttgcaaggagcgtttggcctattcaaaaccaaaccctaccacccagtctgtccacgtgtacttagagagtgtggcacaattggttggctgtgtaggactgtgagctttagagaccttcatacacatttgatcattgatcctcacaaaggctgtgcaattagcaggcatcctcccaggttcataggtggggaattgatgccaaggcacgtgaaggggcctcatcaaactgcataaccagtacccttcgaacctcgatagcaagagcggatattgatcggttctgttcttagagctggatgctgtactaagaagtttacatacatgatctcaatgatgccccccaagaatagcacggtttgggaactgttaccacccccgtctcacaaatgggcactcaggacctcacagaggatgagcagctcggtgaggctgagattccagctgaggcaccctgaccccagagcttgagcttagcctctgcagcgctgcgtttcccctgacatcagccccggcatcgccgcctgcagtgactttggacacagttataggtgccctgcttaactgcacctggaggaggcagggtgggtgagctctatcaggacaaatcctgggggtggccccagctgcaggcaggactcgttcctcagcagagtggccactgtacagaaggccacgtcaagtcagagggcgcagggtggcactgcaaggaaggagtgtgtccaacactcagcacccaggctgcagtggagggggcagcagcacagctttccgggcaggcaggcagctggggacacctgtccaggggcagcactgtccactgccaggctggctgattgggatgcaggagtgagactctattccctggtttgggcagaggcaaggtttcgaacatgaatgtttgttgaacttttattatgtgctgggtggtgaaccatgcacttcacagagatgaggcccttgaatgtgctcttggcggcaggaagcgttttccttattcttcagccagagaaactgagcgcagagcgaagggagcttggccaaggtcgtccgtgagcggtgtcgggcctgacctagcacgccacacctgggcaggtcaccaaggctctgtgcttcaggaaccaggctggggagccccggcccagcagcaggagcagcatcaggctgtgtgggactaagccctggaacatgggacaggagagctgatgccctgattctctggagcctgagccctgggacccgagctgggctgagtgtgtgtggccctctctcaggtctcagtggcaggggaaggaggtcgtggggactggggaccagtgcgtccttttattcatcacctcatagctacctcccaccaaaccccattaggatacagtgtgtcaaatctcagacagcaaatccttctctcataaaggggcaggatcatctccatcctgtttgttccaacagaggctgtagtcaggggcagtttatggggtaagaaggatgtgctgggggcccccaggaccacgcttaggcttgatgcttctctggaaagactcacagaccacagaagtcacagtttcttacagcaaaaggaggcagattaaaatcagcaaatgagaaagtcacacagggtggggagggaccgggtgcgagctttcagctcccctcgcagtggggtcaccagtcagcacccgttccctcagcgttgatgtgtgacaacactcacggtgccttgccaccaccctgggagccctgagccttggtgtccacatttttattaggggtcagccatgaaggcgtggagcacccacatggttgcccacggcttctcagcccccagcccccaagaggtcaaaactgtgacccaggaccccagaagaccaagccaaacctttaccctaaatcccctggttagggtaaaccgtccaacagggccccaggtcccaggtctacaaagacatgcttgtcgggcgggatattccaagggcttagaggtcatcaccaggccaagcaggagccagtcctgtggaatgtgcagggtctggacacccagccccactgagtgagcccttccccgcacaggggacaggtggtctggaagggaggggcatgagtgtctgagggtgcctgtgtccatggagccgccctctgagcactgacgtctcataaagacgtgtcccggctgttgggggtcagcccctcctgtgtctggctctgatttccctgcagggtggggaaattgtcccaccccaggcactcaggtgcagctggactaaaggtcaagggggcattagctcaagctcagagctccttgacttcagctgtgcagaaacgatgagcgcctgctggagggacaactggtgcatgcagctgacggcacgcagctgagaggagacgcccctcattggttttggatgcatcatattttacgcatctccaaaggtgtttataattttttttttcaagtagcagaaatcgccatcaacccagcaaaaataaacatatcagtaaccatggtgacttcagccttccagccctgggcagaaatgatctcaggcggacacagaggggcgcaggcgtggttctaaacgctgggttctattgaaggtggactagatctgattgaaactcttcacagctgctggtggttggaattccaggctccctgcaggtgtctgcccttcccctggaagcctcaacagtgacaggggctgtagctgctggtgcccgggctggtctcctgaggccaccactagcttcctagggaggggctttacccaactaggacacagggccgcagacctgggcaccgctcagccaggcttccttcctcgggcctggacccactatctgcctgggcttctgttgcacagcgatgatgccaggaagcacacatattccagcgttcaccagtgcacaccaccacacatcgacgctgagggaacgggtgctgactggtgaccccactgcgagaggagctgaaagcttgcgcccggtccctccccaccctgtgtgactttctcatttgctgattttaatctgcctccttttgctgtaagaaactgtgacttctgtggtctgtgagtctttccagagaagcatcaaatattccaacattcaccagtgcacaccaaaattctctctgtggattttgggagagcgagagcgagagagaaacaacagcaacaaaactctaaggaactaacggtgtaaagaaataaattaacatgcagaaaatttcacataaggtccatccgcatggcctccccaggcaaagctttcaccttcttcctaaggcccagccttcccctggagaaaaggccattcacccacctgctggcgagggagaggtggcccccagattctcacacacagggtcacggagcttgtcctccctcccaaaccaccttcacttcggatctgcctggatgctgattagactggagagaggaacagatcagagacactagaccagggtgggcggaggaggggccaggaggcagatgcaaaaaggggagcctgccaggcgcagtggttcatgcctgtaatcccagcactttgggacgccgaggtgggcagatcacttgaggtcaggagttcgagaccagcctggccaacatggcaaaaccctgtctctactaaaaatacaaaaattagctgggcgtggtggcagtctcctgtaaccccagctactcaggaggctgaggcaggagaattgcttgaacccgggagatggaggttgcagtgagctgagattgcgccattgcactccaggctgggggacagagcgagactccatctcaaaaggcaaacaaactaaaaggggaacctgagacccccagctctggctgccctcggtctacactgctggcaacaagtccagtccatagttttttcagactttgaggcccaaatctttgatctggaaggacctgggattgccaacttggcagggactagagggtaaagggtggagtctgtccaggcgaggtgtggggtgccctggacacagaagactggattttgggtctttatcccttattgtctccccagatgcttttgtgaagacaggtctgctcttcaggtgctcccctctgcccctgggtcctgagggcaccagccctgcctccccaaccttcttccaggtgagaatgcaggtcaggctggaggcagacacctgcagatcctcctagaatgcgggcagctggggactccagatgtgggagtcctgatacccacagtccagctgtggccgagaaaaggggcattttctactttgctgatctatttgaagggaataacacccaaagatggctttctcccaagtcatggacagacaaaggcaaacacgaaaacaccatcagcctggctggctccgggccatgaagcctgcggggctgagcagacttctgctgcatctgttgggaaacaatgcacagtggcccttgtcccgaggacgcaggctgcctttcaatcactgctgtttctggaaaaagagagcccagtcttcccagagaagcgggcttaataaggacacaacccttctgtactcatgataatcacagctcacggccgtggagagcttcatagcgctccatcctgtactgagccctacacatttataatctcatttaatcctcgtaacaatcgggcaaggtcagtatcgccgtcactgctccccttcaggaagctgaggaactgcccagggccctaggatagatcggcatggggcagggtcagcccgagactcccagcccttagcccacagagcctggggtcacagcggtgaaagaacgggacatacaaatgcagagggctcctgctctagggtcctctaggtgctgtcacagaggaccacacaattggtaatttaaaacaatgcacatttattctcttaaaggtctagagattgaagtccaacacaggtctccttgagctaaaatcaaggtactgcagggctggttcctcccagaggctgggtttagggagagtccacttcttgcctttcccggcttctagagctgccctgaggccttgaccctcggcccctcctccctcttcaaaggcagcactggcgtggaggccttctcacatctcatcccctgagctcctcttccgcctcctctttcacatttaaggatcttggtgatcactttgggcctaccaggataatccaaaataaactcctgatgttaaggtcagtagattagcaattttcattccacctgatgccttaattcactttgccaggtaaggcaaccgagtcacaggttccaggattaggaggcagaaagggcttcagccggggttgacgcattcagatgtgtgctctctatggcctttctgtgtcttggcctggcagtcctcctggagtcgtccctgctggcagggacaggtgctggagtcagctcacgccggcttctgagagcccagtggggaacggctgaaatgtacaattaataaattgcactaaaacaaaggtaacttgagttttgagcatttgttacctttgttttaatacaatttattaattgtacattttatggtattattatgatataattttacgatcatcatgctgtggcagttattacctctgttgcatctgtatggcagaaatcctgtgtaacaggaggtttgctagggcacaccggtctctgcattgagcttcgtcgtgtccacagcttgaaccaaccatcgcaagagcatttacgtcacggaaatcagcatgtgctacaaatcgaggcttgattttatcgtcttattgattatctagactcaaggaaatgatgaaaatcttcgatgaacgcagattaatctacaagtgtgctatggtcataactgttacactgtaaatagcataaaacgttgtcaaatcgtagttgaattgcagctataggctggctacaaatatgagagtttggccaaaatcaacaaaagcatctgtgtggaccagttggctctatggaatttatgataaaaagtcctgtatatttattatttgtaaattgcgtgcttcctttgcatgaataaaacttagagtggactgacgtacagatgtttacacacacgtcttttctgcagagagcctgttgttaaacatttgccagcacaccactgcctaccccctgcaacccccaccccgccagcctcaccttcccggccccacactttgtgctctcgtcctctgagccacgagcactttccagagctctcctgctgcaccgatgccctctgcccagcatgggatgacccatcccaaccatcctctccccttgcctggcccatcctactggtcccccaggcacggcccagcagttattctctccaggaagctgttctctccaggaggctgtcctggcttctgggttgggtcagtgcccttctgtgttctgggggtcctgggttttcccccattgcaccctgtgggaatcgtgcttgcttctctgtgtttaggactggcccctggctgcctcgttggtggggccataaaactctccgtttgtgccccagaatctagcacatttcctacgtagtagatgctcaataaacattcactcaatagaacaaacagaatattcacttaaggagctgggattgttcttgactgaatacagagctaggtctcttcccagacacagaaggaaacagacaaaggaagggaaagctctgatggatacatggttctgaaggggccctgggtcctggcacatgaagacgcttgggcacatgggtggggaacattggggaatgccacgtctcagctcctatgactggagggccctttggaccgttttggcttcaatacagcaggcacctgacatccttgacagaggagtttctttctgcagatgcacgagggatgtggaacccaggactcagagggggcagattagtgttccccccagggggccctgggagccacgatcctgcagccgggggtgctcagaggataaacaggtgaggcagttaatcgggaggcagtcctctgggagccccagtgcagtcagcaaggcatggaagccgtctgtgtgggcttccatcatggtggggcactgggggccatgtggggttccttcacttcacgtaggtgcagctcatcatgggatgacagtggggggttggaggggacaccctacgggtcccagagatgccaagtgaggtcatcgtgatgatggaggtgctggctggtggcctccaaaggcaggcaggggcaggccctttccctgtgtccaagtccacatgggcactctcagggctatgcccatttgacacgagtctccacgcctggtgaatgttggcaccagcacagccattccatcgtggccctgaaaccaccacagaatactccatatcatgatcgtaaaacactcagtgccagccgcaagctcctctgacggaggctgtggttcccacggagcccgggcgcctgtggcaccctctgccctcctgctccatccggagccctggtggctgtgaggcgggggctcctctcctgtccctgccacccccaccaggtggtggcaccccatcctgggaggcccccgcctcctctgcctcttcttctacttggagtgtgaaatcagtggacacgcgctggggcagagtgcagcactgacccccgtgcttgctcactctgcaggcgccgtggcaggggctgggtagggggctgctgagccagcgtgagggccctccccacatcctcacctcggaaggaaatgccctccctggagccgcggggcagtaactgaggtagcacagctgttgagtgcgtgtccggtgccaggccaggggggcaacccgtgttggggacatgttggatgcctctctgagtcctggagcctgagtggctctagcccccagacgttctccaggaagctttactggcctgagggtcgctcgggagcagagatggaggggagagatgggcccttcccactcggcctccagcagctcagcccggcctctgccccctgccaacccccctcctgccaacccccctcctgccaacccccgttttcaggtctccttttggagacaacaaggtcactgtggcacaaggacccacagttccttatagtccagagaaatttagggcggtgggcggtaagctggggcaagaactgttctcaggcagccccggctggaaacatcacagatttgtcaatgagtttgcaaacatgattgagacatctccgctcaggagccttgggcttcaggtgacaatgactcactggcatgggctaccaagtgtgtgtgtatttgacctcagcgggttacacatgcacaacacacagacacacaaagacacggacagacacagatacacacacagacacacacacacacacacacacacacagaaatatacacaggccgggcacggtggttcaggcctgtaatctcagcactttgggaggctgaggcaggcagatcacttgaggtcaggagttcgagactagcctggccaacatggtaaaaccccatctccactaaaaatacaaaattagctgagtgtggtggtgcatgcctgtaatcccagctactcaggaggctgaggcaggagagttgcttgaacctgggagaaagaggttgcagtgagccaagatcataccactgcactccagcccaggcaacagagcaagactccatctcaaaaaaaaaaaaaaacaaacgaaacacagagagagacatacccaaacatatacacagacacacacacacgaatacacacagacacacacagagagacacagagagacacacgcaaacacatacacacactgacacacagacacacatatacagagacacacatatacagagacacacataggtacacacagacacagagaaacacacacacacacaaacacacacatacagacatatgcacagagaaacacacacacagaagacatacagacacacacacagagacacacacagccacatacagacacacagagcctcacacacaggcacacatgccgccctgaggccacacaggccacactttgtacgcagcccccaccttccacaggcctctctgtttgtacaaacaccgccaaacacatccccctcatcagcccctttgagttttcaaaatagttacgatatcctcactccaacaatatctggaggaaggctgcctttccccaattttatttttcttagacaaagaaacaaagagtccaggagacgcctgagagaagacagaggaagtggcagagcgggggaggggagcagagcatccagcagcccagagaaggggagcagggagggggggacccagtggaaggctcagagccaccggtgaggtggaggaccatcacagccacggattctgtaggcggacttgtcaggacagagtggagtgagggtgagtgaggggcagattcagatggctgttcaggggcgagtgtggggagactcgtggctgtgcgggggtgagtcgggggagacttgtgtggctgtgcaggggtgaatggggggagacacatggctgggcagcagtgagtggggggaggcttgcatggctgtgcaggggtaagttggggaagactcccatggctgtgcaggggtgagttgggggagacttgcacggctgggcagtggtgagtagggggagactcgcatggctgtgcaggggtgagctggggagagactcactttgctgtgcagggataagtgaggaggagactcaaatgtctgggcaggagtgagtgagcggtgactcacatggctgggcaggggtgtgtgagagagggagactcacgtggctgggcaggggtgagtgaggaggagactcacaaggctgggcaggggttagtagggggtgactcctatggctgggcagaggtgagtggggagaggctcccatcgccgggcagggatgagtgaggggagactcatggctgtgcaggggtgagtgagaaagggagactcccatggctgggcaggggtgagttgggggagactcatgtggctgggtaggggtgagtggggggagactcctatggctgggcaagggtgagtgagaggagactcatagggctgtgcagggataagttggggggagacttacgtggctgtgcaggggtgagtcggggagactcgcatagctgtgcaggggtgagtgggaggagactcacgtggctgtgcaggggtgagtgggggaagactcgcatggctgtgcagggataagtgagcaggagactcacatgtctgggcaggagtaagtggggtgactcacatggctgggcaggggtgtgtgagagagggagactcacatggctgggtaggggtgagtgaggaggagactcacatgtctgtgcaggggttagtcgggggtgactcctacggctgggcagaggtgagtcgggagagactcccatggctgggcaggggtaagtgagaggagactgacagggctgtgcaggggtgagtgagagagggagactcacatggctggacaggggtgagttgggggagactcacacggctgggtaggggtgagtggggggagactcctatggctgggcaggggtgagtgagaggagactcacagggctgtgcaggggtgtgtgagagagggagactcacatggctgggcaggagctagtgagggtgagactgcatggctgggcaggggtgggtgagggatgaggaatggaggcaaagagcagattgctccttagggacctgggttgctaatggtaagaggctgctgaggaggctcctggttgcagagaagggtttgttttcgccttctgcaagatgggcaggtttgtgggctggagggcaggaggcgaagacacagcctggatgagggggaggaggaggggcttgggaagcaatggggaatgggtcgctgtgagcagagggccctgccagcttcggatggaggggcagtggtgaaggagggaacgtgagtggacagatgttagggctcagtggggggtgcggggtgcagggttgggcccgctggtggagtggaagtcggtcatgagggatgtgccaggtgcccagtcctcagtgcggtcagaggtgagccccaggtcagagtgcacggcctggggagtgtggtgagtagttaatgggtgcgagcctgttgacttctgccattaaaatctctttattttgagataattattataagaagagtcgataagatacactgcactccagcctgggcgacagagcaagactccgtctcaaaaaacaaaaaacaaacaaaaaaaagaagggtagataagatagtagttatcagaaataatacagagagctcatgcgcccacctcccattgcccgtggtagcatcctgcctgactcgggactctctgccctgtgttctggtccctgggctctcctcatggtggccatgcccctggcattcctgtcctggatttctaagccatctttgacctaattagaaagcctggcctaccaacctgcagaccagctgggagaacccttagccctgacccagtgtctggcatgggcctctgggttttagaatggggctagtgatcagaggagctagtcaaggtctttggttgcaggccacagaatatgggctgagaatccaagaggccagggtatgtgggaacttggagccgggggaatagctaaagaaccaaccaagaaagagcagtttccaggtagctctggggatccacgtagttgagtctgcaggtcactgccctgggaggaattgcttttgacagtttcacctccatccctccatcaccctgatctgggtttcaaactagagtctccttggcctggcttgtatcccagccccacacttggccaggaggtggagctccttgattgacaacctctaagcctgcacacagggtcaaaggcagccgtccaaagtcaggcaactgtggccagaggaaggagaaagaaacagactaatttgacccccagatcttggttcgatgttgggtcaaattatggctggcaccagagcccagaagttgcaaggacactcaagtgagaacgtttgggtgtagaggtgcaagacaagtgcatctgagagttcgagtcccagtgtggacgtgtctggcattgtgtagataggcagactgtgctgaaacacgtgtagatcagtggcagagaacaaaaagacctttagttttctgggaaactgtacttaaaactagttatgcatcttgccgtcatgaaacagagtcacttattgccagtaatctccctatgagagtctactcaaactcagatggtttattttttataactttaacctggggactatgatgtttgttttacttacttgtgtggagaaattatatttactcatgctttgttcatttataggaaattggacttacttcccaaccatattacattaacctatggactaacttgttttaataacccagcagcaatataaaagaatggccatagattctctttgaataaggaaaacatctgtttttcttcttaaatagaaaaaaactcagtaagtctattaatgatgattaaagctgatttaaaatacacagcaagactttcagtttaaaaacagtgttctaggctggacgcagtggctcacgcctgtaatcccagcactgtgtgaggccgatgggggcggatcacctgaggtcaggagtttgagaccagcctggccaacatggagaaaccccatctctactaaaaatacaaaaattagctgggtgtggtggcacatgcctgtaatcccacctactcgggaggctgaggtaggagaatcacttgaacctgggaggcagaggttgcagtgagcctagatcccgtcactgcactccagcctgggaaacagagcaagactccatctcaaaaaaacaaacaaaaacagtggtctaagggcagaatttcccccttaacatctaggaagacccgcacacaacaagaggaataagaaacatgagctctatctgtaatgaaatctgggtgtacgtgagacctcaagccatggaggtggaagagatatcaaaagcagcagctggccgggcccagtggctaaagcctctaatcccagcactttgggaggccgaggtgggcggatcacctgaggtcaggagttcaagaccagcctccccaacatggtgaaaccccatctctactaaaaatacaaaaattagccgggcgtggtggcgggcccctgtaatccccactactcgagaggctgaggcatgagaatcgcttgaacccgggagtcagaggttgcagtgcgccgagatcacgccactgcactccagcctgggcgaagcaagggtgcaggaagaaatggagacagaatcttgcagccgcacatttcagaaaaggccatggaggatcgcatcacgaaggcaaaagctggtatgcagcagggagatgaggtccgtgcgcaggcagaggggcacctgcacctgtgttggttctgagaagtggaggatgtgtggctgaatgaagaattacccagcaaaccatacgacgaggaagccgtgtgttgatgttgtaccttttcattagaaaaagagaaagcgtcccatgtacacgtacgagagaaccaagatcaaacgcgtcaggtcatttaatataaacgagataaacagaagaatcaaaaactcaatcccgtgcctgtccaggagagagtcctaaagctctgtgactgagagagcttgtaaaatgaaacgatgggcgaagaacggatggacagcctcaaacagaaacgaagctgggtttatatccttaatgtcaggtaaggctgagttcagggagaaacacaccaaggaagaccagaataggttctttagaataataaagaatgcaactgacaacagatatgtcccaactacaaatatttatgtaccaaaaaggtgcttcaccatgcatagggtgaaaattgtgggagatacagtgaggtacgtgtagggccacgatactaataggagactttaaagaaaataactgttgtaatgtattcaatttctttttgtattttccccaatattttactatgaaaatgttttaaatacacagaaaagttgaaagaattgtacaagaaatgcccacatgccctcctcctatgtcaggggtcagcaaattatagcccgtgggctaaagctcacccactacccgttattatatgggctgcaagctaacaatggtttttctgttcttaaatggttaaaaagtcaaaagaaaaaatatgttgggacacataaaaattatatgaaattcaactttcaacatctacaaatgaagttgcatttgttttacaacagaacccaggcacactcatcatttgcatagtgactatggctggcttctaacaacaatggaagaagagtcgagccatcgtgactgagattgtctggtccataaaatctgcaatatgcattcggccctttataggaaagtgtaccaaactcttcctagattctaaaatgaacatttttctattattgctttatcacatatttgccaattcctctgtcgacaaatccactggtttttcggatgcattttaaagtaagttgtagacaccaatgcacttcactttgcaagcgcttcagcatgcagatcattaattggagttcattatgagtttataattctttttttaaataaaatttacaaacagcaatgtgcataacttttaagtctcatccaaacctctctcacaatgcagaacgttagccgagaatcccctgtgacctttcccaggcactatggaaccactaaggcaaccacagtgttgaattttcttccctggggatgagctttgctggctctagaccttcatataaatggagttgcacagtctgtactcctttgtgtaagatttctctcacatggcatggtgttctgaggatcacactgttgcatgcaatggtaggccaagcctttgatggatgagtattgttccactgtacaaatgcaccatggcttgtcagtttgctctcctggtgacagacacacaagctgagtccaggatttgctttgacttgtcttgggtaaatatctaagagtgggaggttaactcatggggctgttgcatatttaattttataagatcctgctggacatttttccaaagtggctgtgccattttgccttccaacgtgtgagagttctcatcatactacatctttcccaacaattggtgttgccattctttctaattttagccgttctgttgtgatctctttgtggcttatgggtattttcctgatgttgatgatttttgcatgtgctttttggacatcatgtatcttccttcgtaaagtaaaaagttagatgggctcatgcctgtaatccctgcactttaggaggctgaggtgggtggatcacctgaggtcaggagttcgagaccagactggccaacatggtgaaaccccatctctactaaaaatgcaaaaattagctgggcgtggtggcacacgcctgtgatcccagctactcgggaggctgaggcaggagaatctcttgaacctgggaggtggaggttgcagtgacctgagatcgcgctactgcctgagcgacagagcaagactccatctcaaaaaaaaaaaaaaaaaaaaagattagatggattcttgtcatctaaatgttcttgtgaacatttgtgtatcaatatttgtggatttgctcactgtgaacctttgtgtatttgctcacagatgagtaagactaagaataatagtcttgaaacattcatctgtgagcaaatacacaaaaaacaatactggaataatcagtgaattggttaaaaataaacagctctttttaaaaaattaactttattgagatgtaatttgcacattcaacaatgcacccgttgtaagtatacagttcaatgcatatgtcctgagggaaggtttgaggttcctttttcttgttctcatatggaccccctgttgttccagtaccatttgttggaaagactatccctccttcccccattcaattaccttagcattttttgtcaacaattaattgagagtatatttctggactctctgtcctgtcccatgagtctttatgtctatgtttatatccatactacaatgtcctgatataagccttaaaagtatgtagtggaagtcttctaattttattcattttccaaaaaacttttggctgttctagatcctctgcatttccatattaaatttttgagtcagcttatcaatttctacaaaaaaagaatgctaagctttttaaagagttttgcagaattaatgttatttctgcctaaaatgtttagtagaattcaccaatgaagccatctggggctacagttttctttgaggaaagcttttaactacaaattcaatttctttaatagatacaggaatattcaggttattgatttttttcttgagtgagctatggtagtttgtgtttttcaagaaatgtttttcaattaacttgtcaaatttattggcataaagttattcataatattcctttattaatcattcttttaaagtttgtagtatttatagtaatgtcctctttataatttctgatattggtgacttctgtcttttctcttttttaaaaatttttttattttcctgtctagagatgtattaattgtgttgatcttgtcaagtaacttggttttattttcattgatttttctattccttttttctcttctgtttcgttgatttccaccctcaggtttatcattttcttcctttcataatttgaatttaatttgcttttttcttccttcttgtgttgcatatatggataattgatttgaggcctttgttcttttttttacataaacatttaatgctaacaacttcccattaagtgctactttagctgcatttcacaaattttgatatggtgtgattttattttcattcaattcaaaatattttctaattgcctttgtaatttgttctttagcctatgggctatttaaatgtgtgttataatttccaaatacttgaaagatttttcacatatttttctcttattgattcctagtttaattatcttatggttaaaaaacaaatactacataattcaaaccactttacctttattatgatttgtttaatggcctgggatatggtctatcttggtaagcatgctacatgtacttggaaagaatgtgtatttatttgtcagtagttgggtggagtgtcagtaattgtgaactgggcaagcaggttgatagtggctagtactttgttcctgagtaaggaacatattcttactaacttcctgtctacttgttctatcaattactgagaagaatgtttaattgccaactctaattgctgatttgtctgttccttctttgagatctgtcagcttttcctttatgtatttttggagttctataattaggtacattcacatttagaattgttatatcctcataatacttttcttcctttatcattctgaaatgtccctccctatccctggtaatattccttgttctaaagtctactttgcctgatgttaacatagctatgccagctaatttcatgcctagtatatgcatggcatattttttctcatgtttttaatctttaatctatctgtgtcattatgtggatttaaagtcagtttcttgtagacagcataaatctgggccctgctttcttgtccagtttgacagtctttgtcttttaattgcagtgcttagcccgtttatatgtgagataatttgggtgtggttgagtttaagtctactatcttgtaatttgcttcatttgtcccatcatttacttgtttctttttccttttttcctctcctattttgatcaattgaatattcagtattttttttaaatcatggtaaaatacccataacctaaaatttaaattgagtgttttttagtgtttcattttatcgccaaaactggctcgttggttgtactttttttgttatttagtggtcgctctgttgctttttagtatcaggctctagggcatcttcatttgtcacaggccatctccaaatcacaggacacctcttccccatgtagcataagaaccttacaactataactgtgtactttcatttccccaccctccctttgtattattgttttcatacattttacttttacacatgtaggatacacatgagccctacaatacattccacatcatttttaagcacttcttttacgatcacaacttaacagaaaagtaatttttaaatacaaatatcattaacataagatgtcaaaatgacacagcaactacatggcttcttcctcttgcttctagaatgtactgtttgtacttcagttgcagcatttttatgctgttattatttatttgtctttctcttgcattagacaataaggcccttgagagtagaaacaatatctattcatctcgtaactttagcacaatgcttggcacttggcgggaggtcaacaaatgttgtaccatcacggatttcctgactgtccaagtgactgactgactgaatgaaggaatgatgagcctgcggaaacacacataccacacgcaggttggggcaggctctagcacacgcaaccagataagcacccgcccccttgataacttttatgtgcgcctcctcccctctgtcctcacctctcaatgttcagcttctcatttaaaatttggcaagaggaaagaggaaatcatggaccatcaaagagtgccttaaagagaatagacttttaaaagtcacaaataggactcaggtggaccctaagtttggctgcctgccaggagctgctgaacgtggccctgttgggtgcgtcattgtgtctggaggccttgggtgtgtctgtattgtgaacaaatgtgactgtgggtgaggtctggaaacagagagtgggtcactctggatccgtgttctagctgggcctggaaactgtcccagagcccatgcttgctcctgatctcattgggcaaactgagacatcttagcagcagcaccaactgcaaatcattctctgcaactaaagcggagcattgagtgcttaataatgtgggtgttaattgtttgggatataaaaatttcatgcctagagctttaaagttgtaccccaaatgctttctaaagcggttgtgtgcctcaggaatagttaaagctgcctcacagtgtacaacagtgttctcagttctaaaaatgaggatgtggaagtatttctcttctagcattttgagttcagaacaatgatagcattatgttatacttcactctgctttactgacctttctctaattttttaatccttgaattgttggaatgattagaaaaatgttcacaacgtgctttaataaaagtttctacataaataaacaaaaaaccaaaaataataaaataatactctccccctccccagctagttttttttttttttttttttttttccaagacagagtatcactctgttgcccaggctggagtgcagtggcgtgatctcgggtcactgcaacctccccctcccgggttcaagagattctcctgcctcatcctcccgtgtagctaggactacaggcgcccgccaccaggtctggctaatttttgcatttttaatagagacggggtttcaccgagttagccaggatgacctcgatttcctgacctcaggtgatccgcctgcctcggcctcccaaagtgctgggattacaggtgtaagccactgtgcccagcccccagctagttttaactttctattgaagacgacttatttcatagagggatctttaaggtatatataacattatttaaaaagctaaagaattttctttcaaatgtaaaattaaaattaagttcaacagccttcctgtttcatttattgagcacggatttcttttgcatttttgatggggagaggtgggttttgtcatccgtgactctgatagaagaccgatggggtgacttgcttgaagggaggcaggaaagtctccgccaagtgatcagcatttgctctcaacgtgcttctgtgtttcccacacgtgtatggatcggactcatgtagaaatgcctcctgccactgcatcacggaaccagcaaggccttgaaggccacgcgccacggcgcttcaggcgttcttttgtagcccagcggcctgctgtgcagtgatccaagtggagtcgcaggtagtagcagtggggcagggctcatggctctgcctcttaccacctccccgttgttctcccgagacttgggcagtgggcggtggagaaccactgacctcggctactgccttcatttaaacaaggggaaactgtggctctgtgagcttccgtggcctgccaaggtcccatgcacccctccctcgacccttgccgagacagagctggcctcgatgggggtcttctgactcctgggccagcgtggtctcccttgcacccgcattctcggagagggcagcagtggcggtgtggaggagagggcatgccttgagaagcgccggcacctctgagcacgtgggtgagaccccggccagctgagcagaggtgacccgctgaattagtggccagggctgccagcatccagggggtgttgggacccggaacctctctgagcttgaaggctaaggctaggatcccgcgagtaagcctgttctcggtccatttgggccctggccggtgtggagacgtgccaggtgtgatggcacgggagaggggacctctcgtttagaggttgcccagggaatggcagtgagcccaggagatcctccaaggggaatcgggacaggactttttccgcagaaaacaccccatgtggctcatcaaagaggagaggcaacccatctgttccagaacattccagatcatcatttaagacccccaatgactctatcacagaagatagggtcagtatctcctttgcctttaaagaggtcatcacccctagagcttagagttttctagaagtgttcagcctgattcaaccaattcaaaaactactctaagaaagcaaaccaggtattgttttagaagttccatgaactcttccaaaatgatcaggtaccatttagttaatgactactctggagtatttaatgacattccagcacctgagaacgttggtttcatctcataacactcgctaaaatgtgtgttggtgggagagagaaggagagagacacagagagctagtttggagaaataatgtataaatgcaaaggtttctctacacctctaaaatgctgctcattcctctctcggtggcctgaattaacagccagttctgtttctattttggggaattattagctgtagtttctttaaaatgccgtttatcactccattatggttaaaggttgtattagtctgagaagcagccgcctcaaaccggcctaagcaaaacagggagtcccttggctgacacaaatggaaagcccagagtgcacccaagcggcccttggccaggctttaatgatgtcattagtctcccccagccccttccgatcctcttacctttcaaaggtgctttctgggccaggctggagaggaggcaggtggacccttgggtttcacattctccttggtgcaacacatcaatgaagggagagagcttttcccattggctcagtgctggtcaggagagagtctgattggtccagcctgagtcacgtgagtgggcttaaaccaataccatagccaggaggtggggtgctctgattggtcaggtctggaccatatggttggcaagatgtcagccccatctgggccaggtggaaacgatccctcttgggaaaaggggttggttgacatcagaaaggcacgaaagggtactgtacacacaaaactcaccagcccctgtttttctggcccttagttcatgtcttaaatgaccttaatcttgacagccctaggaatagcgccaatgataccctcctaatcctccctggaacaaggctgggtctcaatacataaatgtataactatatactgttttattttaaaacctcgttgcctgctgtctctgtagttactgccttgattgtgtttagcttttagtctggctttatttcttcatatataggccatttgttctagcaatatacatttcaaactcgatttcaagaattctgagagaccagacacagtggcttacgtctgtaatcccagcactttgggaggctgaggtgggtggatcacccaaggtcaggagttcaagaccagcctcgccgacatagtgaaatcccatctctactaaaaatacaaaaattagctggatgtggtggcaagtgcttgtaatcgcagctacttgggagtctgaggcaagagaattgcttgaacccaggaggtggaaattgcagtgagccgagatcgcgccattgcactccagcctgggcgacagagcaagactctgtcaaaaaaaaaaaaaaaagaaaagaaaagaaagaaaaaagaaagaaagaaggaaggaaggaaggaaggaaagaaagttccgagagatttagtgaagtcatccctcaatgcctctaagtagtgagttttttaacactggaaggtcttggcaatttctactgttccacgtactgtccttggctatttgaattgcttaacagactgaccttcaacctgccaggaatgcctcctgcagaggagtcccatggatgtccttactcttcctggcaatggccttagaaatgtcaaaccattttcccagtggccctcaagcacttctctgcaccccttcacccaagccacttgcctgcaaagaagcctcccgatcactccaacttcccttcgaagcttctcagcttcttggctccacgtgctttctcttggctaccatgtggatttttaaaatctgattattttagtaagaaatgacctcagaccacagttatgaagttggctttatgaagcactaacaaaccactttagatctttagggtcagggaacctaaccttgctcctttgctcacttggccatcggctgagtggcttcttccctacatacatctgcaagcggatggccaagtgagcaaaggagcaaggttaggttccctgactctaaagatttaaccccaatatagacatgacacactcctctcttccatccagaaggtgtcctgctccatctgacagcaagttctgtctcctgtgggcttctgcaaaacatggacatttgatcaaacgctgcttaaatgtcggccatgttttggatgctcgagtggccatgcgtgttcgtgtgtctgagcgtgtgtgtgcaagtgcacagaacttagctccattaattagcctgtcaacccgaggttggagaccaagttttccggagctttggattctgcacggtgccttcctagccagcactcaataaacacttttaaatgaactcaagacctgcttcaagatttacaaaggtgttttccttctgttccactcccgggtctgcaccttgccctcacagatctgaagctcacaggacctccagcaccagcctgctcttacacccgctcagctgccagagccttctgggggtttttgatggccacacagtcacagcgggagacagggcagctgctttggtgtttctttctggaacctcaaaatggtgcatgctttaagattgaagatctgaacatgcaaaacccaacactgaggtatcagtgcatgccctggaagagctgaggctcaccagagccttcctgccgggctgccaatgcgcttcccagagctgaaaaggatcacaaggtgactggggagacatgatcgccaaagcctaacctcaaactcacagtgaaataggggaaaagccagaggattttcctcacctggagaaagcggctgaacatgaggattcccatgttccttcttttttttttttttttgagacggagtctctctcttgtcacccgggctggagtgcaatggcgcaatctcagctcactgcaacctccacctctcgggttcaagcaattctcctgcttcagcctcccgagtatctgggattacaggcacctgccatcacgcccagataatttttgtacttttagtagagacagggtttcgccatgttggccaggctggtctcgaactcctgacctcaggtgatccacccgcctcagcctcccaaagtgttgggattacaggcgtgagccactgcacccagcctccacattccttcagctaaaaatcttagggacacaaaacacgtgggcaggattggtgagaaatcatttaaaagcagccctttacatgattcagcccttataggatggaacaatccaatttgacttcgtagaagcatggatttcctccagcaaaacacatttggtttctttttggaaaacaggccatttttaagtggttgaaatgttcttggaaacattctcacatgattgcactgaatactttgtgttagcattaaagctaaaaatacacccagtggttttttttttttttttttttgttcttctccgcttgtaatattgacatcccttgtatccacacactcaaggagctaacatttgatgattagattttccatttggattaaacactttggaagtttcttttttataagttatgagaaaacaaaccatgagatcatgagagtgaacaaaacgtggacttgttaaaatgtccaaatgccattagagattgatcttctcacatgattaatctccttgttttgagaggcaggggtgcctaatgggcagaacagagccctggatggagctgggcactgccatgcactgattttgtaatcttgaccacctgcgtcctttcctttacccttaaaaggaccagcttacagaggatatgcatcctcaaattcacccaatgtcatgaacctgccctccaaagtggttgtaccatgttattctccaccgagaatgtgctagaaatcctgttatctgcatgcttgggtacacttgttgtcgacaggctcaaaacgtctaaacatgtgaatgagtgtgacatggtctgtcattgttttaagttacagctccatgtttactgacaaatttgaacatctttttatgtgtttggtggatatctgagtttcttctgtgaattttctattcatatccattgcatgtttcaaatatcagttttttgttttgtttggttttgttttgttttgagacagggtctctgttgcctatgctacagtgcagtggtgcaaacttggctcactacagcctcaacctcctgggctcaagtgatcctcccaccccagcctctagggtagcagggactacaggtgcaagccacctcacccaggtgatttttgtattttttgtacagacttggtctcactttattgcccaggatgctcttgaactcctaggctcaagcaatcctccagccttggccttccaaagtgctgggattacaggcgtaaaccaccatgcctggcctgaatttcttatatagtctagatattaaatctttttggttgaattgtacatgtatattcccttaaacttatgctagcatcttaaaagcgttgctatgaagaatagtgttctaccaatactcttcgaaattgatttcagggattctgagagatttaacatttttataaatgctaatgtatgtatgtatgtatagcataatttgtgtatgatgaagataatctatttcttgaggatttgataaaaactcatctgaaattctatctaggatctctagggaggtgggagagttttgattaccaaatcaatgtatattaatggttataggtttttccaggtgttcgatttcttctcgattcggttttggtgatgtttacttctctgaagatgatcccttccattgctgctttcaggttcattggacaaggttattcatagtatctcatagatgtgttttaaatttcactgccattaaatccccttttcattctcattagtcataatttattctctttactccctcttcctctccctctgtcttttctgtcccctgcctccctttctgtgtcattctggctgatgcttgtctattttattagtttttacagaaaacccacttttgagtttgttgattttaattgcttctaggggtaatattcatctatgacaatatgacgtgttcttgccatccatccattcaggtggagctggcatcccctaactcaaatgattcttgggttagaaattgccatttcctaaccccagagtcatttaagaggacattttaatttctttctttctttttttttaatccagacggagtcaggctgcagtgcaatggcgtgatcttggctcaccacatcctccgtctcccggattcaagtgattctcctgcctcagcctcccgagcagctgggattacaggcatgcgccaccacgcccggctaattttatatttttagtagagatggggtttctccatgttggtcaggctggtctcaaactcctgacctcaggtgatccgcccacctccgcctaccaaagtgctaggattacaggcgtgagccaccgcacccggcccttaatttctaacatacttttgaagtgcttgtattgttgatttctaacttaattgcattgaggtctgagaaagtgctctgaatggtggtaattctaaaaacttgctgaaactttttctaaaactttatttacagttatttaacctggtcccatgtgcttgaaagaattattttgtttcttggatgctaaaatgtttgccactgctctgagcaattgttgatttttttttcttgaccctgctgggacctactgaggagggcatggaattccctcagacttctttgtccaagtaacaagagagggccgtcagctggcagaggatggagcccccatgcagctgttggctgaggccacagctggaacaagacaaaaactgcatagatctgagctgggcacaggggcctggtgcagtcggctttctaatttatcattgtcaatttggtatttattattttcttccttctgatatttttgtgcttatttgcttgttctttttctaatttcttacgctggaagcttaattcattttttttttttagcctatcctgttttctaatgtaagcttttagggtttcaaatatcactttaagaaacatttaatctgtactctttaagatttaagatagtttattagggctaaactattattttctaattttcttttttaaaaattttactttaagttctgggatacatgtgcagaacatgcaggtttgttacataggtatacacgtgacatggtggtttgctgcatctatcaaccagtcatttaggttttaagccccgcatgcattagatatttgtcctaatgttctccctccccttgccccccacgccccgacaggcctcggtgtgtgatgttcccctccctgtatccatgtgttctcattgttcaactcccacttatgagtgagaacatgcagtgtttggttttctgttcctgtgttagtttgctgagaatgatggtttccagcttcatctatgtccctgcaaaggacatgaactcattcttttttatggctgcatagtattccatggtgtatatgtgccacattttctttatccagtctatcattgatgggcatttgggttggttccaagtctttgctattgtaaatagtgctgcagtaaacatatgtgtgcatgtgtcttcatagtaaaatgatttataatcctttgggtatatacccagtaatgggattgctgggtcaaatggtatttctggttctagatccttgaggaatagccgcactgtcttccacagtggtcgaactaatttacactcccaccaacagtataaaagcattcctatttctccacagcctcaccagcatctatcgtttcctgactttttaataattgacattctgactggcgtgagatggtatctcattgtggttttgatttgcatttctccaatgaccagtgatgatgagctttttttcatatgtttgttggctgcacaaatgtcttcttttgagaagtgtctgttcatatcctttgcccactttttgatggggttttttttccttgtaaatttgtttaagttccttgtagattctggatattagacctttgtcagatggatagattgcaaaaattttctcccattctgtaggttgcctgttcactctgatggtagtttcttttgctgtgcagaaactctttagtttaattaggtcccatttgtcaattttggcttttgttgccattgcttttggtgttttagacatgaagtccttgcccatgcctatgtcctgaatagtaatgcctaggttttcttctagggtttttatggttttaggttttacatttaagtctttaatccatcttgagttaatttttgtattattttctaacttcaacatagtttcttttttgacccatgagtgagttagtgtatttattaattcctaaacatgtgctccctctccccagttatcttttgtgtttaattattaattgtggataaataataaaatgttcatgaaaccaaatttttaacattttttgggttttgctctgtgtcctggaattaggtaaatttttgtaaatgttctgcttgtgcctgaaacatgcctgtgttctctcatgtcacagatgcggctggtgtcacctatgtctctggggctctgtcattttgggatgttctgtataactcgcaactagcagtgactgcatctctgtgttagaaggcatttctggaaatacggaaggcagggcaggccagaagtacttgggaattgacattcctaggaaaagccatgagacagtgaggatgagagctggggaaaggccctctcctgtctacagacatgtttgttttactgtcctggtgaactgaagctttgtcattgagtactgacactctatttattgctcatggttttgccttacatttatttttctgatatttacatgtattctttggttaatgttttcttgctatttctcttctctctttttagttttttatatggaaatgtctaaacataaaatagagagcttcgtgtaacaaactacaatgatgcagcttcaagaatcagcagaaaaccaacttttgtattttaaacctgtttttaaagaactaagttggcttttgaattttctctcttggagatgtttttcaaagaaccagaccattcatccattctacctatgtctgatttctaactcagggacttctacttttacctatattaattccttctttttacttttttttgccaggtataaggtttgttttaaacttcaattattctacccttcattttcaaaatttttaatgtgattctctttttatatcttttttctttgtttaataatttcttctgcttcttttacatttgaataatttcttcagtatttccgccagaatgtcctataaaattaattctatttgatgtgaatgcatgcttctaatgtttccaatgctagttttggggatcggtcatttgggctggaatccaggtctgctggccctggttttcagatagctcttcactcagttatgtgactccatggcattaaaaaaggctttgaaaggccaggtgcagtggctcacgcctgtaatcccagcactttgggaggctgaggtgggcagatcacttgaggccaggagttcgagaccagcctggccaacatggtgaaatcctgtctctactaaaaatacaaaaaattagctgggcgtggtgacacgcacatgtagtcccagctactcaggaggctgaggcaggagaattgcttgaacccaggaagtggaggttgcagtgagctgagatcactccactgcactccaagctgggtgatagaatgagactccatctcaaaaaaaagtggggggagctttgaaagcctcacaaattaggcagacaactgtaaaaacttaaacaaactattatgaaggcttagtaaggtattcaaagccagtggattgttagacgtctccatgtgttttagaattgtggtttgcaagctcatgttgcatgagaacttgagtttctgtttttttgtcccccaaccaaggagcagctctgggccccctctctgccagctccctcccatcccaaggctcacctgggccagcctccttctccctaggggctggggcttgtctagcagagtctcagcactgccatctgtgaaacccatcccctcccttgcccacagtgtccttggccaaggagccctagcccagcccagcccagccagcggcagcagcagctttttctcagtcactttcaccagcagggctggcctgacccctgccctgctttaagcagggagctgtctccatccccacctcactcctgaccctccagcacctgcctccagccccagagcccagccagccatcctcagccatgggcatcccaaacctggctttgggtatggatttgttcttctaggttttatgtttgaggcagcaccatgtccccacaccaccctgcctattcgtgaagaggtctggagaggtggtgtgactgcacagcatcagggactggtcagctgagggatgagggctggaatccaggcctgccggcccgactctcagggcacacatcactctggcaggggacttcatgacattaaacaaattaggcagacaagtgtaaaaacatacaaactattctgagactgcttagtagataagctattcaaagccaatggtttattagaagagggaaaaatatatgtgtgtgtgtggtgtaagtgtgtctgtgcggtgtgtgtagtgtgtgtatgtggtggggtgtgtgtgtggtgtgtttgtgtggtatatgtctggtgtgtggtgtggtgtatgtatgggagatgtgtggtgtgtgatgtgtggtgtgcatgtagtgtgtatgtagtgtctgtatggtgtgtggtccggtgtgtggatgtggtgtgtggtgtgtgtgatgtatggtgtgtggtacactgtgtgcatgtgtgtgtgtgtggtatggtgtgtgtgatgtatggtgttgtgtgtgtgtgtgtggtatgtggtatatgtatatgtgatatgtgtgtggtatgtgtatgaggtgtgtggttgtgtgtgtgaggtgtgtggtgtagtgtgatgtggtgtgtgtctgagatgtgtggtgtggtgtgtgtagtgtgtgtgttgtgtggcatgtgtggtggtgtgtgtgtgaggtgtgtggtgtggtgtgtgtttatggtgtgtgtgtgtgaggtaggtgttttgtgttgtatgtgttgtgtgtggtatatgatgtggtgtggcacggtatgtgtgtgaggtgtgtggtgtatgtggtttgtgtgtgtggtgtgtggtttgtgtgatgtgtgtgaggtgtgtggtgtggtgtgtgtcgtttgtatgtgtgatgtgtgtggcgtgtgtgcacacatctgtgtggtgtgcgtgtagtgaatgtgtgtttgggtatgtgtgtgttgtgtgtgtatggtgtgagtggtgtgtggtgtgtatgtgtggtgtgtgtgtggtgtgtggtgtatatgtgtggtgtgtgtatgtgcctgtgtgtgtggtgtgcatggggtgaatgtgtgtttgggtatgtgtggtgtgtgtgtggtttgtgtgtgtggtgtatatgtgtggggtgtgtgtgtggtgtatatatggggcatgtgtgtggtgtgtgtagtctgtgtgcatggcatggggtgtgggtgtctgtatagaaaaatgaagaggagctccctgagttaacatacctgggacccactggacaattgagcctcatgtttttttaaaaccttaatggttagaagactgggaaatagtttttttttaaaccataagcaatttctgtgcccagaagtgaggaattccttgggtggaatatttcgttgctctggtaagcctcacagtgtcattggtgtgcgtttggccgtgggggaagaaaaggaggaagaggtgatggctccagtgaaactgcagggacttggcgccagtggagctggcagtggcctccactggccagtagggaccaatcgttaaacccactcttggtccaaaattgaattattttaaaaccaagagtactaaatcctcaatcctcaaaccttatcaattcctagttatgttatcccattttattctgtcagttccggaggttgttgatggtggaaatactccacgacagggtgcagctgcacctctcttcctgatgtgtccagggaagtcatattgggcacttttaattggtcagtggtaggagcattgacaccatggaatttggcaaactctacaagccagggagttattttgaacccccaaatctgattgttcagtgtggatcagtataccactgcttaaagccgtggctttttggctttccaggttgatgaggcctcactctccccttatatcggtcagaatagttccttagcaatacgggaagctactctcctgttaagatctgttaagatgtgagtatggccgggtgtggtggctcacgcctataatcccagcactttgggaggccgagacgggcagatcacgaggtcaggagatcgagaccatcctggctaacacggtgaaaccccgtctctactaaaaatgcaaaaaaattagccaggcatggtggtgggtgcctgtagccccagctactcaggaggctgaggcaggagaatggcgtgaacccgggaggtggagcttgcagtgagctgagatcgcgccactgcactacagcctgggagacagagcaagactctgtctaaaaaaaaaaaaaaaaaaaaaaaaaaaaaagatgcaagtatctcagtatcttaggacagccagggataaaaaacatggtcattcaaaaacaaataagcccaagttgtttcaaatataagaggaaaaaataaggtaaaactgtcaatttcttaaaaacaaactactagttaaggaaaaaccatgactaatagagaagaatatattattgaccatttctagaacatgcacacaaaagacaaagctagagttgccagtattagtattagcaggaaaattatgccagtaacagtattagcagaaaaaaaaggaagcaaatttcatgttcctacatcagagaatagctgaataaattatggcacttacaattcaaggaaagatgatgtggctaataaaataatgggtacgatctgcatatatggccatggaatgctttcaagatatggaaaaggtaacatgattagtacaattccatagtgatttaaaaggaaaactacctcacataaataatgcacacacacagacacacacacactcacaattacttatgtgttatgatcagaggaagttatggaaggatgttgttttggtctgcttggggtatgatagggtttggctgtgtccccacccacatctcatcttgaattcccacgtgttgtgggagggacccaatcggaggtagttgaatcatgggggtaggtctttcccatgttgttctcatgatagtgaataagtttcacgatatctgatggttttaaaaaggagagtttccctgcacaagctctcttctcttgtctgccgccatgtgagacgtgcctttcgccttccaccatgattgtgaggccttcccagccatatgtaagttcattaaacctctttcttttgtaaattgcccagtctcacgtatgtctttatcagcagcatgaaaacggattaatacaggatgctataacacaacagcatacagtgggtggcttaaacaacagaaatttatttcttacagttctggaggccacagccttagtgttctcttctgaacatggcttctcattttttacaacatagataggctgagatttttccaaatctttaagttctagttctgttttgcttagcaattctttcttcaatccattatcttttctcacatttcactataagcagtcaggaggaaccaagccactccttcacgactttgcttggaaatattcccagctaaagatcccatttcatcttttacaagtttcaccttccacaaaacactagaacaggaacacatgtcagcccagttttttgctactttataacaaagatcacctttcctctgctgtcccacgccatgtttctcatttccccctgagacctcacccacatggcctttggtattcctaccagcattctgctcatggttgtctgtgtgtcctctgagatgatgaatgctttccctccagctctcctctcccctttctgagccctcagcaaattgactttagtgcttccttcacagctatctcagctttttctagcatggacccccaaactcttccagcctccactcatcaccaagctccaaagctgcatccatatttgtggttcttggttacagcagcatcccactcctcagggccactttctgtctcagtcagcttaggccgccatggggactgggtggctcaaaagcaacaggctcccagttccagagcctgggaagtgtgagatcagggtggtggcagggtcagggtctggtgggggccctcttcgtgactggccaacagaagacttcttgctgtgtctcccatggttagggttgagagagcatgaacatgctggtgtctctctctttgtatagggcaccaatccaaacatgagagccccaccctcgtgaccttatctcctccccaatgcagcacctccaaataccaccacattggaaatcaggggttcagcacgtggattttgggagtccatagcagaaatacacccaatttttaagtatctgatacgtgcattgggagtgaaaaaggctagaagcattgtttcatatatctttattttgttataatttatcctattttttcgaaagagatcttccgcttctttttgttttctgaataatttggtcctaaagtcatgaggtgggctgagcaggatagggttctattctggcatggacagggcagtaccctgagtcagaggaggtgcaggagtttgagcagggtgagggtcgtgctcatggaggggaggcctggtgtagaggtgagagctgggggagattgggaggcatcctttggtgggggcagctgactcagattgtatgtaccccagcaggggcaggtgggtaccccacaggggggctgaacgctgcagctcatgtctattccttatgtctttcagggttcacccagggcccgaaagcttgtgtctggaccattgagaaagacaactggaccgttctatgtggatacgaacatgcaggaggaagtccatgcttcctagcacaggccctagaatcagagtaaacgaggtcagaagtcagctgccccactggctgtgtgccctagacaagccaggggctcctctgtgcctcagttacctcacctggaaaatgggaatcactttggagggaccaacttgtcctggttttagcactgaaattcccactttccaggaactcctctcccctccttcccagtcctggcaaagccaccctaaataatccccacagtgctaggctgcgctgagagtaaagtgctgagcgcggggcagtcacttggtaacaggtagttactgctttcataataatggaagcagtttacagacatctgcttgggagaaagtatgaaactgtccaccacccacagtctggaactgctaggcttttagtttgtggaggcctcgccgactgtctccttctcttctgcagttagagaagggctgcaggagtgttagcaacaactcagccagaaagagaaaccagtgtatttcctgtgatcaagtcacacagcctaggctgcaacagcgagacagccagtagttaagaagttggctctaagactgagcaaccaggaagagctttggctgtgggctaagatggaaaccacgagcggaagtcagacatagcccagggagaagggggctgggcaaggcatttactcatttagaaatctatcatctctctctctctgcctacctatctatgtatctatcatctatctatctctttatctatctgttcatcattgattcattccttccttcattcaaaaagatgtcctacatatggttgcttcatattggttgagctcagttatgttgctaaaaagatttttttttcaatttaagaggcatggacattttgcagtggatttcagtggaaagttgatgtttgtgggttcagaagtcagtccttcccacacgagctccaggcccaacacttgcatctgctgggaagcaggttgcaagccctgtgaatgcttccgggacaacagttccctgtctcagcctctgatatgagctgtgccatggtgcacactcttgcaatggggtggcacgaatatcgcagtcagccaagatcctctgctatcctagaattcccaggaaactccccttgagagctttaatcatttgtttgcccttcaataactgcttatggagaagttcccagactcactgacacctatcattttaggggacagttatgaatgaaaaacactttaaattgacaatgattgggctgggcgcagtggctcacgcctgtaatcccagtactttgggaggctgaggcgggcggatcacctgaggttagaagttcgagaccagcctagccaatatggcggaaccccatctctgctaaaaatacaaaaaatcagccaggcgtggcagcgcacacctgcagttccagccacttgggagtctgaggcaggagaattgcttgaacccagtaggtggaggttgcagtgagctgagattgtgccactgcactccagtctgggtgacaggagtgaaactccatctcaaaaaaaaaaagaaaagaatgattgaattgttacatttcagttataatacatcttttaaattatgttgtaaatcagttgacaatatattatttaatgtcccaaaatatattagtgtctatacaactttgaagagttatgaagtatggcaacataaaattgcagaagcaactcaagtgcaatatacagtggctgtaaatatactttgtagctaagtttttctggacacggaagtgggaaacattcaactttttaaaactagtgatttcagctctctagactagacttaattttgtgtacagaaaacaaaaccttttccccagaacatgactgcctgctttttccctgacattgcatagatgccatttggcatagaacatttttagatttatgtgcccaattgtagaatccttgacaaataatgcttctggtatggacttctgaaaatgaccccagtgtcagcttgcatttaagagcacatttttccatggggaattctaaaagtatggcaggtactgactttcccagtgaagatgtggccagggttggcaaattcccagcacagtgtccctgccccgttccgtggcagacatcactaaacaatcagagcctcaggccccgctgagtgtgggcttggctccacaggaattaaggcagtgacagccgtactggcagatcggactgggcatgtaagatgaacccgaatggcctcctcctcaggtgagatactttgtgctgacgggagctctattggtgttcgcttcatcagcccttgctacacagtttagaagccatcggagctctcaagtctcaaccctcagaaatgactgtgttaaccaatatcctgtcatctccatctcacctcctcggccctggggttgtccccctggccaagaaccaccctgtaggtgatgctgggccatacttgcccctgcacaaaaccccgcctggatcccagtggattcctcagcacctgtgtggctgtggcatgtgggcttccagagatcttgtgtgaagggaagaccaagcctatagccctggaggccaggggccaaatttggaatatttttccaacacccacagtgttgcagagctctctatactgagtcctacagtttggtaccatgaggaattacagtgaggcaatctatttacaaatgaaacaaaaacaggcttttatggactggcctgggaacctcacccttgcacagatgggaaaatgcattctcactgctgaacaataagcccacgaaagcactggctcgcctgggactgccaacacgggatggtgtgcgctgcctacagaccagagaagtggacagtggcgcctgccgcaagctgctggggcacccgctgcagagctgcggctgagggggaggtgggcttttagccccagcaactttaaagatcctgtctccagtgctccatcaggttttataaagagatctgaatattcgaaatttttaagttaagatttcgatggtttctaaagacaaaacctttgctatcagggcacatttgtacacagggcccccagtctgacttttaaagagcgcagccaggagccaggaaggctgaaacggaatcacactgttagtccctggccgcctctggctctgctctgctggaagggccctgcccactgtcctgaggagctcaggatctcatgggttccaggtagcaggtgagctttctgtggccccatacaccaggtgttccatgccaccttgtgcaacccactccactcagctccgctttccatccccagaccccctgccatcagctggagacctgaaggtagggaacagctgtccacatccagcggtgactgtgggaggttcacagcacactgaggaggagcattcatctagaccccgagctgtccaacttactgcctttgaaaccctctgaaccctggggaggcactgactagctttgcttttctgtcctctcggctcccatgaggcacaaatggcctttcggttttcctgcagccactgggactgtcccagctatgtgggcagcacctggactgtcttggtgagcagatttgagatttggtcaacaacagtctgtgatttctatcaaatggcagcctactacacacatatgcctttcaactccagctacatgagatatttttatgtggtttttccattttccacatcctgcaattatttaataggtgttgtggctgtaagattctgccgctgacagttgggaacctcttaggagccctcttcccgtgttggggagcaaaatgctctgccccaacgtgactttctatgttagttttgacggcgctatttcattttctgtcccagctcatgcttacctggcctgctgtggacaggcctcatcctagcagctgcttctctgtagaaaacacacaataaacatcccactgccaacagcagcgtacatcccagaactcatcggccaccggagcctgagacatttgttaacatgacaaggccaacggcagtgcagaaagtgaaaatctttgaggaagcaggtgcggccagtctgcattcgtctcaagccctcccaagtttacaaatgaaatcatgaaggagcccagttctctccaagtataagctcccaggagaggggttcccactaggggctatatctaaaatgggtcattgttcttgcagacaaattcgcctgcactgtccagtaaaacagaggggcatacattccaggcgtgccttcacacatcactgtggctcgtagccacgtgtcaatgtggttcatagccactcccgctcactaaatcacactgcctgggcaggttctccaaagatcagaatatggaagggcagcacagccggcctcagggcaaagcagtgaagcactgggccctgtgttcgctgtctttggacctggctgtccccttcttccctcacgcaccttctccccacacctattgtacagaaaccaccatgtgtgacaatttgtgacctgttttccctgttcccacaccaccccctctgcctgcctacggtcaaatccaattcccctggcttccttcttcgtgttcctattcccaaacccttctccctttttttttttttaacacctttccagtttctctttttggaagtgggccagagtcagcgatcagggcagctctttctgtgaattgaaaaggacaggtgcgtcaagccggtgtagatttgctagactccccacagggtccttcttcaaacccctccttatttttattaagaagaaaaatcccccacatctcaagctctccctttcccagcttcagcctgccctgcccaccgaaggcatttgcagttaccctgctctctcctgggctttctccctggctcctgcccagaatattctagaatatagactccaggaggactagaaaaagcaactcagtggtttaaaaaagactgctttggagaatgacatctttaatgctaaaaacgctaattgtcattaacttcattatcttcgttattctttattcatcaagttctttacatggaaaggaccatgtttcctccaggactcgtagctgacaccaccccaccccccattagacagcttcctccactgctgccagaatggctttaaatggcagaacacagttccacagcacacagcacagcttgaatacaaacgcccctgagaggagcgagggccaaacagctggtctcagatgccaagagcaggttctgaaaggtaaggagaggatgactgagctcaaggacaccaaagatgcagaggggtggtgaccagaggaggtccccgcaggaggctccaggggggccctcagagacacagctcctgcccttcccagcatggcccagggtgctccagcagggtgaagcccccgcgggtaagccactcccttgcctgtcatcatcccagccagccaccacgccacagtctccacgccacagtctccacaccacagtctccttgctgttttgtggttctcagacctgttgagctttcagcagagcaagaaaatagtctgcggcgtatttttcagagtgaatcatttcttatcctgtggttcatcaggaaaaaacaaagcaaaaccctcatcctcatgtcctcgtggcctgagctcatacacaaatcctgcctgcaatgacctcagactgcaccagcaggtgaggccggcagtgagggcagcctgatgggcttagaccagcagaccaggttaggaaagcagatggccccttgcagcaggggtgcaaagcccctgaggtatgtgtgcaaggggactggcaaagcgttgtgaaagagacggaggacactgaccatcagcgttgccacctccagtggctcaggactgacccgaggcatggctctcaactctggtcacccactggagtcccctcttcctggatcccacaccccaagctcctgccttatgggtcaggggtgacagtcactccccaggtgattctacagggcagcctggcttcagaactgtgatggcatcacactcagtcactgtgcaagaggcagggaggcctggccagtctgggtggggctggagggttaggtgttcatgacagatggggagggagttggcacgctctgccagggctgacgttacgatgataccattttcaagaaggaatacagaagtgatgtgggcacttagacccaaggagctggttcaaaatgtgcagcctcggccgggggcagtggctcatgcctgtaatcccagcactttgggaggctgaggcaggtggatcatgaggtcaggagatcgagaccatcctggttaacatggtgaaatcctgtctgtactaaaaatacaaaaaattagctgggcgtggtggcaggcatctgtagtcccagctactggggaggctgaggcagaagaattgcttgaacccaggagacggaggttgcagtgagctgagatcacaccactgcactccagcctgggcgacagagcggccctccatctcaaaaaataaataaataaataaaaaacaaaatgtgcagtttcagacctattgagtcagaatgtggccagtgtgttgggcaaactctggatgattcttgcacacattcagtttcaggtgttctctgtctgggaggcagacttgaatcgcctgggaagatgcccagtctcaccccatcagaatctctgagggatcccaggctgtgggccttgccataggcaggaggtggggcatggagttagatcatcgggaaagggctgcggggagggattccgggagctggagaccccctgggccaggtccctgcaggggaacaggaggtggatttgagaagaaggacactgcatacctggggctggagaggcacgtgccatcatcccaatgcctgaggcaatggagcaaagggaaggaagggacatccctccgctccccacgtctgtgatgctgtggctgggctcacaggtgctgggaatgccccatcatcacactcagctgccacacaggaaaggacagtggcttgaatagagaacagagaccctcagtgtttggccctccacctctcaggagtgaatcaagcacacctaaaacgagttaatgtggctggaggcactgatcacccccaggcagccccacactcaggcctttcccacccgaggcactcgttagaggcgctggcagcctcagctgccccggctggagaagccacaggagccagccaagggcaggcgctgcaggagcatgggcggatgacaccgatgatgggcttcatggagatgcctgcagacaatgccagcagctaagggagccgcactgatctcaggctgcaggaaaggtgctgtctcagaagtgggttctgctctcctctgaggggctcaggcccctcaggagagctgggggtgggggagtcacaacttcttatggggggagctgagaaatccaagtgcacccagaggtaggtggccagagagcagtggctgaagggcgtgtcctgctggatgtggatgggctgattcaagaaaatgatgaaaacaatttttatgtgtagacctgatttgcccaagacaggttcccaagtcgtttgtggaaaaggaaaggcaccccctgactgtcagtcacaggccggtgacctcaccactgtttgggtgattgcattgctgttattatagacgggttgcaacattcagctcctggcctggttcctggaaatggcatgctggggaccctaagaaatgatgcacacgtgggaagacaaagctgaccccagcagcaggctgtgggtgagaggcagcgcagctgtgggaggccagcctcacctcctcccctctggaaacagctgtgtgttcaggggccatgctccagagaaggaagtgagcagccaaagactgggaagtaatgcttgtaaatatgctaaaaacagaagaaaagatggacatgaggggtgcaaagagagagcatcccagtggagaactggaatctgcaaaagtcaccaattaacattccagaagcacaaataactatttgacatgagggtattgcagatggctttaagagcaggctgcatctagccgaacataagattaatatgcttcaagatggatcaatagaaaacatccaaagcaaatcatggagagaaaaaaatggtagaaacagaacattatgttgatatagtcaatgccaacacaggtgtgactggagtcctggagaaagggggagagtggggagggagagggagggagagagacagggagatgcaagatttgaagaaataatagataaatattttctaaatcttatgaaagacagcaacccacagagtcaagaaattagatccaagccagatgaataagttcttaaaggattatactcaggcacaacatagtcaaactatctctaaacaaatctatcaactgttatcattaataaataatcttagaaaattcactaaaatgtgaaaattaaacagtattctcttaaataaacgatagttcaaagaagaaatcacaaaggaaattggaaaatactttaaaatgaatgaaaataaatagaaacaccacataccaaaaggtccaggatgcagcaaaagcagcactgagaggcaaatctatggctgccaatgcctgtatttaaaaaaaaatctcagataaataacctaaacttcctcctgagaacctagaaaaaggagagcaagctaaacccaaagcaagcagaaagaaggaaataaagattagtacagaaacaagtgatcttagcaaggttgcgggctataaagtcaatatacaaaggtcaatactattttttatagactaacaccaaacatttagacagcaagactaaaatatatcatttacaatgagataaaaaatattaaatacttaagaataaatacaactcaagatgaacaagaactcaaccctgaaaactttaaaaatctgcagagagctgggcctggtggctcacgcctgtaatcccagcactttgggaggccaaagcaggcagatcacttgagctcaggagtttgagaccagcctgggcaacatggcaaaacctggtctctactgaaagtacaaaaaattagccgggtgtggtgcacgtctgtagtcccagctacttgggaggctgaggtgggaggatcacctgggcccaggaggttgaggctgcagtgagccgtgattgctgtactccagcctgggtgacaggagtgtgaccctgtcccaacaaaacaaaacaaaacactgcagagataaattttaaaagacaaataaatggagagctattctacatttatggatcaggacatttaatgtgttaagatatcatttctcctcaaattaatctatgaatgtggcgtagtcaaaaccccagtatgcttgttttcttctttctctcctgctcccttttttgaagacaattgacaaggtgattctaaaatttatacagaaataacatccagaacagccaacacaaccttgaagaaaattggagaacttacactatcatatttcaaaacttagttaaaaactaccgtaattaagatggcgtggtgttggtacaagtacagataaacagagcagtggagaagaacagatggttcagagatttaccttcctcccatatacggccattggttacatcaaagagccagtgcaatgaagacaggagggcgttttcaatccctagtgctggagacactaagaaagcatttggaaaaaatgcacctttcagcctacatagaaattaattcaagatgcatcataaacttaaatctgaaaatgaaaacagtgctgcttctagaagaaagcaaataaatgtattttcatattcttcatttcttcagagatttcttaaagaaaacacacacatactaactataaaagtgattagatttcattaaaactaagaacttctgtcatcaaaaaacaaagacgaaaactgacatcattacaaaattaaatggtcagccgggcgcaggggctcacgcctataatcccaacactttggcaggccgaggcaggtggatcacctgaggtcaggagttcaagaccagcctggccaatatggcaaaaccccatctctactaaaaatacaaaaattagctgggcatggtggagggcacctgtaattccagctacttgggaggctgaggcagtagaattgcttgaacctgggaggcagaggttgcagtgagctgagatcatgccactgcactccagcctgggtgacggagtgagactccgtatcaaaaaaacaaaaacaaaaagcaaaacaaaacctaaatggcaaactacagactgagaaaacatattcaaaatccatctatgtgacagagggcacctatttagaaatattaagcaattctacaaaccaatactaaaatcaaaacaatacaacttaaaaaaaatgaagtggcacatcattaatcagtacagaacagcaaattaaagccttgatgatatgatcatcacattccaatcagagtggctacattttacagaaactgacagtgcaaagtgagggcaagcacgtggagccactggaactctcacattgcaggcaagagtataagtcggtaaaaatttggaaaactggttgatagcatccactagcattaagcacattcttgtcccataacctggcaatttctctggtagatttcactcaacaaaaatgaatgtttgtatccaccaagagacagatacaagaatgctagtggcaactttatttataatagccccaaactgagaacaacccaaatgtccaccaataggagaatgaaaagatactctctcacataaaagagtaaactatggactcaagcactaacgtgcatgaatcacaaaaacatatgaatgaaagaagccagacacaaagtagtaatactgtattccaattatataaagatcaagaataaacaaagctaatctatggtaattgaagccagaataatgtttacctgtagagacagtaattggttaggaaatggaagaggaacatttttacacaatgcaaatggtctatatcaggatctggatggtgaatgtacaggtgcatagacatgtaatattcatcagactttacagaaagatttgtgcactttacttaaaaagcagtccttacaggaaggaaaaaaagggcagcttctggagccacacccacctgttttgactctggaattgggtactttcttgctgtgaccttgagcaagtaaaataatctgtgccttacttccccactgtgaataataacagtgtctggctcatggagctgtgatggggattaagtgagttaatggatagacttctcagcacagagcacctaatacagccttcattccattcgtccttgttaccaggtttctgctaagctcccttccagggctgagatctcagaggcttcaccagctcactttcccccactttgctgcaataatcattggctagaggtattgtgatatgatgtcattaaagttaatctagacgaaaatttgatttacctaaaactattacactgtagacctggaggaatttcagtttttgccgtaattgttttcaatgtgtgttataaaaaataaattccactatgttcacgaatgtacaacttataatctgaccaaaagtgagagatgggtagattttcctacttgggtccttctgtggacaggtactaggtgctgctttacgcccagtgacttgtgagggaacagaactgccctttagtaaccctgctcacttcctgttttctgcagtaacaattacattaggcaatattattacacatggaattgcatcatgctgattttaaaacaatcctccctgtagcattacacagacactgaatcatcatttgtagtttggggggctttacatgcctgcagtggtgaaaactgaaattttgtcccacttaagggagtttcttcttccctttattaattgcaaaataaatatatgtcacttcagagggcagcagctggactacctatgtttgtgggtaagtcactgacaaaatgctttctagtaagaaaatatctttaaatataaatgtatggaataagtgtaattaactagatgtagattaagaaaaatgtaagccacatctcctagttcaggcagcaatcatttgtgacttaaactgtgatgtaaagtatctgtgacctataccagtcagacaccaaatattggtgagctgcctggatttgggagatgcagtgagaatgagtcagagcccacgacatgagggagagaaagggggaccctgaggacttggggtccggtgtgaggatcctgcactcggtttctgtgatggtgtgtgcaggggagtcacaagttcaggtgggcctgtggcagggctgcccatggcccctggtgagcatgtgcggccagccgggccatgggggtgaggccggcttggtggcttggattgcctactcctctgcagggtcccaacgggtttctagatccctccagagaagcctttgggtacatcccatggcttcccagcctccccctctcagcctgtgaagaagaattctgatcaagtgttgggcatgaatacagtcttcctggaagtgtggggctttgatttgcaacctttttacgtgcagtcttcatatatcaggggtccccaaactttttggcaccaaggactggtttcacagaagacaatttttccatggtttgggggtggggtggagggatgctttcgggatgattcaaatgcaatacttttatgttgcactttttttttttttttagacggagtctccctctgttgcactggagtgcagtggcatgatctcggctcactgcaccctctgcttcctgggttcaagtgattctcctgcctcagcctcctgagtagctgggacaacaggcatgcaccatgacgcccagctatcttttgtatttttagtagagatggggcttcaccatgttggccaggctggtctcgaactcctgacttcaagtgatccacctgcctcgacctcccaaagtgctaggattacaggcatgaaccaccacgcctggcctactgtgttttttgtattttgttttattcttattttattgtttttcatttttcttacgtcccgaggtacatgtgcaggatgtgcaggtttgttacataggtaaacgtgtgccatggtggtttgctgcacctatcaaccaaccacctaggtgttaagcccagcatattgtgcttttttttttcacctcacttgccactataaagcctgccaccagatgtagcttaactgtcacttgccactcactgatagggttttgatacgtgtctgcaagcagttgatttattatggtctctgtgcagtcaaacctctctgccaatgttaatctgtatttgcagccactccccagcacgagcaccagcacctcagctccaccttagatcatcaggcattagttagatttagattctcattagaagcgtgcaacctagatcccttgagtgctcagctcacaatagggttttcactcctatgagagtctaatgccgccactgatctgacaggagggagagctcaagccataaagctccctcgcttgccgctcacctcctgctgtgtggccccattcctaacgggccacggactggtctgcagcccaggggttggggacttgtcttacatgacagggtgagctaccctgagttaatctgagtgagcttcattctgtcgaccttcttccactccaccacagcgctacaccaacctgaacttcgcttcctgagacctaagattcagccccgtgctcagcagacatcagggatcaccgactctgtgccaggagctgttcttgatgctgggaacgcaggggtggacaaaacagagaaagccctgccctcaggtgtggtcagaagagacagggaaggatttggaagctaaagctcagatccagactgggcttgtttcaactcgttccgtgggcctgatgtagtctagagatgattcttggtgtgggctgtgggagctcctgcggtgtagtttggtgaggggccagcccgaggcaaactggggacctgtgtctccaaccttcagcacttctgcccttcagggtcatccctccaggtgccccaccctggggacttgaactctgcccttgtcccccaaaccaccttaccctaatgctgtggttctcctggtccatgcagggcgcagtgtcctgctgagtgtgcaggtgcctgtccctgccctctgcaatgtcatctccatgcagcagcagcgtttacccacggatggatccccacccctggaccatgcctgggtacaggttttgttccggttggtctgctattgagtatggaggccagggttccactccagacccctctgactcccctcaccaggctgttcccagagacttgtgagggaagttgacaataaatatgtaaattcagatgggtttcatgttagtgaaaacctgaatattgaaatattacaaacctagggttgaagatctcaggctggtgggagtgcctttgtgcatgtatccacccacttttccttgcagaactttctacacaacaattcagcacaggaagcatggaggagtaaagccatctggggagagatgagcagtgaaaaccgggggccggcaggttagaggaggggtgtgatctcagggtgcaacgctgttgaatgcacgcctccctccccccatccctctctcggcagctcccaggcaacttagtcacccccatcttaatcttactcaacagtcacaacagtctctctccctttttttttttcgtttgagacaaggtctcgctctgtcacccaggctgaagtacaggggcgcgatcacagctcactgcaacctctgcctcccaggctcaagcgatcctcccacctcagccacctgagtcgttgagactacaggtgcccaccaccacgcctggctaatttttaaaattttttatagagatgaggtcgcaccctgttgctcaggctggtcttgaactcctgggctcaagcgatcctctggcctcagcctcccaaagtgctgggattacaggtgtgagccacaatgcccagacttcaacagtcacagctatctcttggtgtagactgtttgctattggcaaaaggacagacacaaagaccaatggaacagaatagaaaacccagaatcacacccactcaaagatacaaagcaaatcagtgcaggaaggacagcttttccagcaagcgctgctgatgcatttgggtatccacgggcagaaaaaaagaagaacctggacttaaattttcttatacaaaagttaactcaaaatgcatcatagatgtagaacattggagaattttgaaagttcttcaggcattatgaatcctaatcctttgttggagatgagatttgcagatattttctcctggtctgttattaacacttttcgtcttcttaacagggtctttctcagagtcaacatttttcattttgatgtagtcccgtttatcaatttttcattttatgggtcatgcttttggaactctttggctccgtatcctaaagatttcctcctaatattttttccctgaaaggttatttcacatctatgatgcattttgagttaacttttatataagaaaatttaagtccagtttctttttttctgcccgtggatacccaaatgtgtcagcagcacttgctggaaaagccatccttcctccagtgatttgctttgtatctttgagtgggtgtgattctgggttttccattctgttccattggtctttgcgtctgtccttttgccaatagcaaacagtctggattattgtagctataaaataagtcttgataccaggtaagctgatttctcctcctttattctttgttttcaaaatcgtttcaactattctaactccttggcctttctttaaattttagactactcttgtttatatatacagaaaattttgctgggattttaatagcaattgcattaaacatgcatattttgttgatcattgatatttttactacgttaagtcttccaatctataaacagtatttctctccttttttctttagttctttttttacttcttttatcaggattttgtaggttttagcatacaagtcctgtacctgttttgttacatttactactaagtattgaattttgtttgagcagttgtgaatggtgtcacgtttttaattccagtgtccatgtgttcattgacagagcatagaaataaaatttatgtatgtttatcttgtatcctgcaaccttgcttgaactcacttattgtttcaggagtgcttttgtggatagattgggatttcctaggtagacaatcatgtcatttgaaaatagaaacagttttgcttttttttccctttccaatctgtctgccatttatttccttttcttgctttaccacactggctggaaattccagcatcatgttgaataagagtggtgaaagcaaacatccttgcattatttttgatattaaggaggaagcattgagttgttcactattaattatattattaactgtagatttcttgatgctgtttatcaagtggaacttctctattccgatttttctgagtgttttaaccatgaatgggtaaagaattttgtcaagtgctttttctgcatcaattggcatgatcatgtgatttttttcctcttttatctattaatatagtatattacattgattgactttcaactattgaaccagccttacgtctctggaataaacccaacttgaatgtggtatataatttttaaaatatattcctgactctgtctgctagtattttgtttgggttttctgtatttatattcatgagggccattggtctgcagtgtagtagtcttgctgtgttgcccaggctggagtgcagtggctattcacaggcatgacaattgtgtactaaggcctcgaactcctgggctcaagaaaccctcttgcctcagccaatgatcaactatagtattttttaaaaatattatatttgtctgattttgatacctgggtatgctaactaaataaaatgaattgagaagtatttcttcctcttctgttttctggaggagattgcctagaattagtgttaattttttaaaatgtttgatagaattctccagtgatatcatctgggcctggagaattaggtgttgtttttgttgtttttttttttttgagttttcaaaactaaattcaatgttcttaatagttatgagactattcaaatagtctgtttatattcagtgagttgtagtttgcatcttgcgaggaagtggttcatttcatctgagttgtcaaatgcatgattgcagagttgtttgtagtgttcccacattgtcctttggatgcttgtgggatctgtagtgatgtcgcttgctccatccctaatatcagtaatttgtatcttctctgtttttcctttgctcatcttgctagaggtttgtcaattttattgattgtggccagacatggtggctcatgcctgcaatcccagcactttgggaggctgagaagggcagatcacctgaggtcaggaattcaagaccagcctggctaacatggtaaaaacctgtctctactaaaaatacaaaaattagctgggtgtggtggtgggcacctgtaatcccagctacttggaggctgaagcaggagaattgcttgaacctgggaggcggaggttatggtgagccaagatcatgacactgcgctccagcctgggtgacagagcaagactccatctcaaaaaaaaaaaaagaaagaaagaaaaacaatttattgattatttctaagaaccagctttgtgtttcattgattttctctactggctttctcttttcaattacattgatttctgtgattatttgctttcttttctgatttttctctcctttttctacattcttgaggtaagagtttcaattatcattttgagagttttcctcatttccaatgtatatgaattcagtgctataaatttccctttcccgactgttttagttgtgtcccacaaattttgatatttttattttcatttttcatgtatttttattttcattttcattcaggtaaatgtatttttattgcccttcagactccctctttgcctcataaattattttaaagtatgttgtttggattctaactgttcagaagtttttcttatatcttcctgttattgatttctaatttgatttcactttgaccagaaaacacagtctggtgccagccatggtgactcatgcatgtaatcccagcactttgggaggctgaggtgggaggatcacttgaggccaggagttagagaccagcatggtgaaaccccatctctactaaaagtacaagaattagccagacatggtggcacacacctgtaatcccagctactcaggaggctgagacatgagaatcacttgagcccgggaggtggaggttgcagtgagctgagatcatgcccctgcattccagcctgggtgacagagggagactctgtctcaaaaataaataaataaataaataaataaataaataaacaaacaaacaaacaaacacaatctgtacaatttcaattcttttgagtttgttgaggtttgctctgtggcccagaatatggtctaacttggtatctgttttatggatacttgaatgtgcattcttctgttgttgggtggagtgttatataaatattgattagatcctattgatgaatggtgttattgagttcttctatatcctggtactacaggcatggtgccaccacatctggataattttaaaattttttgtagacatgggacctcactatgttgcccaggctgatctcaaactcctgtgctgaagcaatcctcctgcctcagcctctcaaagtgctgtccttcttgatgttcaaagtttcattcttttaccattttatttatgtttaaataacttcatttcatcattattttaggttatgtctatgagtgacacattttcttagtttttctttatctgagaatatcttgatttctgggtggccagttttttttttttttctttcaggaaataaaaaatgttgtgctaattctttctgtcttcttctattgttttcagtgagaaatatgctgtcatgtaaattgctttttcccctataggtaaggtattgtttctctctcattccctttaagatttcttctttgtcttccgttttcagaaatttgactgtaatatgtcttggtatagttttatttgggtttattctgtgtggagtttgctaaggttcttgaatctgtaggtttatatcttttggtaagtttgagaggttttcagctgttatttctttgattactttttaacccctcagccccacttctgggcttctgttagatctgtatatacagtcctacaggcccctcaagttgtgttcattttttgttcagcttgtttttctctgttgttcagatttgatgatttctattgttccatttcccagtttattaattttttcctctgtactttccattctgctattaagcccatctgctgagtttttaatattggtaatccattctaaactttctattttgttctttttatcttctatttgtttgctaagactttctactttctattttattttttcaagtctgctcataattgctcactgaagcatttttatgatggctgcttgttaacatttgttggataattctaacactgctgtcctctttgcattggcatgcattgattggcatccatccattaattggcttctctgacatcactgtgggaggggacgggggcacggcactgccaccttactaccaggcaagggtagaagtccaggttccctgctcagcctttgttgacacccaaaagaggggctcctcattaccactggatgggggttgaagttctggctttccatttggcctctactgatacctccctagctgggggaggtagaagaccttaactactgttccccacatggtcttcatgacatcacagggtgatgagtatccttgttaccctgggtggtggtgaaagtcctgactctactgggtctcctgtcaccaccccagcaaggtggacgaggagcttctcattagtgcccagtgggagcagaagtccagacttcctaattggccttctctgacacatatattatggctagaagagtaagagttggtttatgtgcctaattacagcctgaggagggtggaaatctgaactccccactctttctttgctggcatgggcagacatttgaccacagtttattctggaatgtttggttgaagcagagaagttattgtctaaaaattttctgtcctctaggttccccttttcctattcttttggctagagagagcaggcttttgttgggacttttttttttttttttggtctgtgctcatttgcatttccaggttttcagcttcttcaactcaaactctgggacatatgatgcaaaacaaaaatctagggacctcaccacagtgtggctctttgggtcccaagaaccctggatggtttgccttccttttcctatcttctagagtctccttatgttggttttgtgtaatatccaaggttttgaattgtgcttagagggagaagtagggaaaaatatgtctattccatcttcccacaagcctgtcctatgaccttgaacagattgaacttgtgctccttgtagaaatctgcccatttggaataggtttgccgtcttcacccaataaatacctgatagcagtgaacgtgtggaaaagatacttagccaggtgctaggagacctggatcctttttcggggctttatggccctaaggaggttacaaacctcagggagcctccattttctttttttcatgtagcaggataatttactgagataatttatgatgttaattttccctgctctagcaattttcccctccctttaaaaagtagtcatgtctttttttcttttttaaaatgagttgtttttctcctaaagcctttagggagttgcaggacctgaggcagaagtttccaggcatgcagaagataatctctctaatcaaacttttgcttttgaaagcttaggctccacaaggtgactgccccaggccctcctggagaggaggaatgcagagctggggttctgggggagggaggcaggagggtcaggagaaatgtctcggagcctggaaaggggagctgtggagtctgcaggcaccaggagagctcagaggtctcagggaggcaagaggacttctgctcaggtgatcagggggctgagtccacagaacacttgaactgtggcctttggagccatggagagttgatctggacctgacctgggcttggcatggaggagctgcctctgagggaccaggcacagatcatctgactgatagaaatagcaaaatgtgggctgcctggtgcctggtgtgaaagtgtaaaacccatgagggtccagcgatggcacctgccctcctaccccacagggcgttctgaggcaaaatgcaatcatgcacattacaacattttctaaagcactcgaggttgtccaaacataactcatggtttttattaagcacctactccagctaggctccgtgctgggaatgatgttagagcaaagcaatattagtgagatgctggaatttatcatctctttggagagataatgcatatactgggtgaagaaaaagctaagggttagagggtcaatctagaaactacttgtaaggattttctcatagagtggctttgggcctctgacttttaacttccttgtcaaactgatgatcgtaatcaagacttcttagctgcaagtgactgaaatctaattcatactagttcaaggtcagaagggagagtagaggatcccgtaacaaagaataataatagtgagcaccagcatttataagatgcacactatgtgccggccatggctttcaaatgctgacacctctcatccttgaaacagtcttctgaggtgaacaggatggatcatcagcccgcttaatagctgaggtcacaggggcacagagaagaacgagtttgtttaaagagccgccatctggctctggggcccagcacttatcaaaagttaaaaatggttgcccagccacttgggaagggccaatgatggacaatgggtgtgaactcgggagggcaggatgtaggggctccagcgatgaaagggctgatgaaagggctttgtcacttccttcgtctccggctctacttccctgggggtgtttacttaattcctagccagacaaacactctccttacatcaatgccaaaagggaacagggaaagaaaccctctccctcttagggtccaggaagtccctgcgagaactctgatggccctgctgggttgtgtatcttttccagaacatcagtagtggccagagggatggaatgttctgggaggctccaggtgggggttgagttctatggttgaccacacggagtcaggggtgggaggttccttggaggaaacgtggggtacacagtggttccagttacttcctagcaggtatttgttatgggtgtgatgggaagcttttaattatttgtgggaaggaggcctccagtaattttccggtatctgtctctgagacttctgtcttaatcttcaactttgaaggtcatcttggggccagatgttatttactctttcttcatttgaagaaatggtttcctagatctttcccagccactcttgattccatgctaatggaagaaaacaaaaggaatttgtctgtaatacttaacttgtcttgtcttaacttaatctatgaaatatctacttgcagtttttcccctgaaaccatctctcatcatctgtcttgccaccatagcttccaggcatctgccgcccccctccctccaccctgcacctccctgcctccttgatttccctcatctcatggcccctcctttgcactgacctcccacaggctgtgtgtgcttggtgaagaaggggtcctctctatagctgggctggctcaccagaggaagcgaaggagcgtatctggatgctggagacagaataccattgaagtcaagagtgccagcaaaataggaaacaaacagtggagattaagcattctcatttctttcttcttttttttttttttttttgagaccaagtctccctctgttgcccaggctggagtgcagtggcgtgatctcagctcactgcaacctcctcctcccaggttcatgccattctcctgcctcagcctctggagtagctgggactacaggcatgtgctaccacatctagctaatttttgtatttttagtagagacagggtttcaccgcgttggccaggatggtctcaatctcttgacctcctgatccgcccgcctcgggctcccaaagtgctggcattacaggtgtgagccactgcacctggcctcagcattcccatttctttcaaatgaaccaacacacagagttgctatttggtgtatccaaccagccttatgctgctgccctccctgatgacatggtctctgtgtctgacccactttcccaggcttctgcttgaagggctaaggcatggttttcctctgctcctgttcttcttcctttctccactcacctttcccttcctccttccttcctctctctgtctctacctctcttctttccttccttactttctccctgctatgatccaaatgttggtatcctccccaaattcatatgttagaacctaatacccatagtgacagcattaagagatgcgatcctgggcctggcctggtggctcatgcctgtaatcccagcactttgggaggccgaggcaggtggatcacctgaggtcaggaattcaagaccagcctggccaacatggcgaaatcctgtctctactaaaaatacaaaaaaaaaaaaaattagctgggcacggtggcatgcgctggtaattccagctacctaggaggctgaggcaggagaatcgctggaatctggggggcagaggctgcagtgggccgagattgtgccactgcactccagcctgggtgacagagcaagactctgtcttaaaaacaaaaatcaaaaaacaaaacaaaacaaaacaataacaaaaaaagagatgcggtccttgggaagtgattaggccatgaggaatgggattgacgaacttattaaatggtttgaaacaggttgaaaggagcccctttcctttctaccacgggagggcacagaaggcacacctatgaggaacaggcctccagacactgcattttctggcgtcttgaatttggacttcccagcctctagaagtgtgaacaatacatttctgttgtttttaagttacgcagtctaaggtattttgttataggagtccaaatggactgagacagaaattggtaccaagaagcagagtgttgcagagacaaagacctgcagatgtggaagaggctctggaactggataatgggcagaggctggaagagtttagaggaacaggctcaaaaggcctggactgccaagagtggacataaagggtgatcctagtgagggctgagaagaagacacagagcctccgagattatgtaagtggctgtgatcagaatgctgatagaagtatggatggtaaaggccactctgttgaggtgtcagacagaaatgaggaacgtgttactggaaacgggaggaaaggccattcttgtgacagagggcagaggacttggctgaactgtttgtgtcctcatgttctgtgaaagtcagagtggcaagggatgaacttgaatatttggtggaagaaacactctaaaccatgtcttgaggacactgcttaccttctctccactgcttatggtaaaatgtgagaagggaagaaatcaattaaaaacagatttttttttttttttttttgagacggactcttgctgtgttgccagtggcacaatctcggctcactgcaagctccgcttcccgggttcacaccattctcctgcctcagcctcccgagtagctggggctacaggtgcccgctaccatgcccggctaattttttgtatttttagtagagatggggtttcaccatgttagccaggatggtctcgatctcctgacctcgtgatccgcccgccttggcctcccaaagtgctgggattacaggcatgagccaccgcacctggcctaaagacagaatttatagtcaaaaaggaggcagaacttgcagaatattctcagcctgaccatactgtaaagaataaaaaagcatgtttagaagatcaagggtgtagccaaactagcgtttcaggcagagattagcatggacaggcagaagccaggtgctgtgcatgaagacagtgacggcataaccctgaaggtgtttcagaggttattattgctgccctcccatcacaggcccagggtgccgaggtctgggggacagaactatgcccacagaggtgcctggagtgcctgcaggacctcggcacctgctgcagtgtgtctccctcagagggcacaatcaataaaccttgggcttctgtgcagggccatctccatgggtgtgtagagggtaggagctatggaggcatggctaactccatctggatttcagaggatgctttggagagccttggggtccaggcagagaactgccacaggggcagagccactgcagagagcccccaccaggacaatgcccagtggaggtgtgggggcagggccacctgaagacctcagactagcagagccactgacgtgcacctccagcctgagagagccacaggcaggagactccagcccatgagagctgcagtatgggctgtgcccagcaaacccatgtaggaggtgccacccagagccctgggggcctaagtccctccttagagtgttcagaaggtgggaccatggagtcaaagaagatataatgctttttgccctgttgggttttggacttacttgagacctgttatcgctttcttcttttctgtttttctctttttggatggaagtgtctgccctgtgcctgccccatccttgcattttggaagcacataacttgtgtgacttcacaagttcaccgctgaaggaatttgccccaagaggacatttaccttgagtcccactcacatctgatttaaattatgtgtagctgggactctgggctttagactttttatttggtgccgggaacaatttaagactttgggccctattgagatggaatgaacatatttggcatgtgagaagactgaattctggagggccaggggtggaatgctatggtctgaatgttggggttccccctaaatttatttgttgggacttaatgctcagtgtgattaatactctgatagtactaagaggtgtggcctctggaaggtgattagttcatgaagactttgcctcatgaatagggtggagctctcataagacaggttgaagggcccatctcttcctcttccatcatgtgaggacacagaggcgccatctatgaggaacaggccctcacctgacaccagagatgctggagtttgaccttggacttcccagcttccagtgctatgaacaatacctttctgtagtttacagatttcccagtctacgatatttgttacagcagccagaatagactaagacacacgtacactccctcccttggtcagagaagccaacagggccggggccaggctgaccagaagggagatctccaggcccagcccaaggcaagctcgccacagggatgcgtctcgagcatgagcacctgctgtgttgtcccggcctgggatgacgagggcacggtgttcatccctgtctctccctccctcacatcactcaccactgtcagacaggagagccacaagccctctttcctacttacacttggggcagcatcttctgttcttaactggctgggaacttttatcttcagagtcagagatctgggttgtgaaaagcaggcaagcagacaaacatctctctgcagccttctccccattctcctacccagtttccagaatttgggggaaaaaaatcccataagctgtcatacttcatattgccatcaggcagcagtgggaatggtgcagagaggagctgggcaaaggggcagagggacagctttctttgtttttttgttttcctccatgaaatggggaggtgtcaagtgagcgagatgtccccggccacacagtgaagcacaaggcagccgaagacacagcaggcaggtcaggtctgtgtgcacattggcaggctgcatgcagaccagcctcggcccaggtggagaagcagagggatctgcaggggaaccagggattcagagacctgttgttggggtcctgcagaagatggggcaattcaagtcaccaagccagtctcaccccaatggcctggctggttgcagaaactcaccagggacaaggggtcaccccaccacaggcccacctggacatgtgactcccctgcacccaccctcacaagcaccaagggcaggatcctcacgccagaggccaagtcctcagtgtgcccctttctccccttcatgttcagcctcagcagctggaagtccacagaaataaatcagacacttctaaaatgggacaccatagggaaggccagatggaataagagttctcttcccacagacctagacttccattgactccactcgaagtcaactgggtgatgctgttggctgcaagtcaaggccaacatgggctgtgctaatagatgcagaccctctagagggaaggagcacatcaccctggcctgttctgtcctgatcacactgaataggtgttctttggtggccctgaatttcatgagggacacgaggaactggcacccatcccgagaaggggaaagtgggacaaaagggcgtcttctaggaagccacactggagagactgggggcatctggtccagagaacaagggtctggaaagaatgttgttgccatcattggctggccagggcctactctggggagtgactccatgttgctatggtgtgcagagcagtcagggtgatagggagtccaattggacacaggttcagtttgctaatggtgacaacacttaataatggagtgggttgccagttgaggtagtgatatagtttggctgtgtccccacccaaatctcatcttgaattgtagctcccataattcccacatgttgtaggaaggacctggtcagagatcactgaatcataggggcaggtctttcccatgctattctcatgatagtgaataagtctcatgagatctgatggctttataaaggggagtttccctgcacaagctctctctcttgtctgccgccatgtgagacatgcctttcaccttccgccatgatcatgaggcttccccagccacatggaactgtgagtccgttaaatctctttcctttgtaaattgcccagtctcaggtatgtctttatcggcagcgtgaaaatggactaatacagacaggaagtggctccccactggaaattaccagctgtcagcaatgccttagcagaaatttctgttggggttgggactaagctggtcctgtcgagagctccccttgcctggttgatcctcagggttctacttagaatgcctcgaaaagtcttggctggacacccatgcccagtctttctgcagggtcccattggggttaaccttctcatttcatcccatgtgaaccaggccaggcccatcagggtttggcaaccccctgatgcagtggttgctgccaggtgacaggagcaagcctgcagctgctggggggccatgcagagacagcctgccagaggggagaccacctggggaggccagagccgtggagacagcaagagaccaggggctgaggacagagtagtacaggtctttggtcccagtagtcctgaaaccactgcactccgaacctttctgtacttagcttaagccagttggagtttctgtcctttacaaccaagagccttgataggaatggggtcctgtgctacgctactgttggcttctttcccgatcgggcgctggaggggaacacagcagtgactacagtgggatgcttactcggtgctgggcatgctagaaagtgcttgccatgccttatttcccacgtggtggggattttgaccccactgtacagacagataagtgaggaccctttcacttatcctgcaacagaaaatccagcagccaaagccaacaagggcccagcatagcatcttccctctctgacttcatcctcacgctccacacaccatccccctggccattcccagcagcccagtaagcactgcctcacacttccagttccggaccagccaggatggccaggctggatgggggccatccaccggctgaagccaattgcctattctcgagctgaaggtgaatcaatcccgcataaatcttcgggcagagaactgggtgggggtagaagagggggaatgtctagaaggaaattctgggcacattcctggaagtgaggaggatggatattggacagaaattatgtcattgcaggcaccctcacttgccctggccacatggacagttcctccccggctgtgttccgtgcctcctctcgtgctccagggcctgtctgttcctggagcgagatgggtcccagggctgggcaccagtccccatctccagccatcaggcactttcctctctgtgttttggcgtaaacactccctaggtttgtggatctgaatcctcttcccaacacactcaagctttgctggcctccctgcagtgtatgtttaaggcaccacacagcctccaaggcctggcacccgggcagtggcacctggtaaacacagcagtcagatttcctcatttcagccaagtgtaaaatcaaggtaatggatctactcttttttttttttttttttttttttttttttgagacggagtctcactctgtcaccccggctggagtgcagtggctcaatctcggctcactgcaagctccgcctcccaggttcatgccattctcctgcctcagcctacatagtagctgggactacaggtgcccgccaccacacctagctaattttttgtatttttagtagagacggggtttcatcatgttagccaggatggtctcgatctcctgacctcccaaagtggtgggattacaggtgtgagccactgcgcccggctggatgactcttgagacaacaccattcagacaaaggcaaggcctcccacttaaactcataaccgtgtctcctttctctccttcgatttgagcggctgaatttggttacagtcatctgacctgtgggtgtgaagtccacctgcctggcataaaaagctgtgcctcctttctaggtgaggagaaagagagagacctggctcatctgaggtgtggttgggaggggggacccaggtgtgctggaaatgaaaagaaatgcattcctgtttttcgtcccaacatgcaaacaactgaacaaaagcattagggcctgagactgggagtaaagaattccttgtcaccatggataccaggaaatggccccacttatatataataagggctttagagatgctggaccatctgatattccagcctggggccacatgggagtgtgccctggtgttattccttatacagttccatgaacatggctctggaaacacctctgtctgcagaaaatgaggcttttctttttttgttcgggggtgaacagagggcagaggcctgggcatcttcactcagcacccctttgtaacccagcacttagcaccatggctggcgcacagcaatgtcacatgtgtgagtgcacacgatgcctcactgccaggggtcaccccacaccggtgctgttgggggcgttggagtggttatctcttctttagtcctcaagctcctacctggcagagagctgcccaacaccgtcggggtggggtgggcgggaagggaagaagcagcagcaagaaagaagccccctggccctcactctccctccctggacgccccctcttcgaccccatcacacagccgcttgaggcttggaggcagtggatttccgagcctgggaaccccggcgtctgtccggtgtccccgcagcctcacccgtgctggcccagcccccgcgagttcgggacccggggtttccggggtggcagggggttcccatgccgcctgcgaggcctcggctcgggccgctcccggaacctgcacttcaggggtcctggtccgccgcccccagcaggagcaaaacaagagcacgcgcacctgccggcccgcccgcccccttggtgccggccaatcgcgcgctcggggcggggtcgggcgcgctggaaccagagccggagccggatcccagccggagcccaagcgcagcccgcaccccgcgcagcggctgagccgggagccagcgcagcctcggccccgcagctcaagcctcgtccccgccgccgccgccgccgccgccgccgccgcccccggggcatggcctgtctgatggccgctttctcggtcggcaccgccatggtgagtgagcgcatccttcgtccgccgggaacggttttattttcaaggagagcaggaaacacacaaagactcgcaagctcgacctgacacccctcccaggagcgcgtcctctgggcgctgacccagggcaccctagagtggcgcccggctccgatcgctgcccctgcccctccgccagggccacctggagcctcgggatgccccttgcaccggcagagagcacggactaggtggaggggccgggagtggggcgggggcagcgagttgccctacaagttggaccgatggccttgacctgatggcttctgggcggggggcgtggggagctggggacccggagcgcactggggactggggaggggccgcagcttgggccggagggaagaggggacttgaagaaggggagccccgcgcgcgcggctgtgggcttggggaccggggacttctcgcgccatccccaggaacgccaggcaaggtctgggggaacaaaagaggaagctgcccccagagagccggagcctgcgactgcactcccggggacaccctctcccggacccactcggggaggcggcggcgaaggcccggggagacccgcgaggggcaagcccggattcctgccggccgcctttctgcgcgcgccggagagagagacgcggtggggacagggatgcgcatttcacttccccgagctccggagagggatggcggggtgtcggcgagttcactgctggacacagttactgtaagtgctgtttccaggggtggtcaggaatctccctttctggttttctggcattaggaacaaacaacaaaccaatcatcaggcccccagccacccacctcaccttatcctagcgcccttcatgtctacgcccagcacaccaacatcgtagaggtagctaaagtacaaatggaaagtcttccgtattccacgccgtgtatctgtgtagttactaccctgatattacttccccgaggctgtaagcccacagtgcatggcacgctccggggctcaccccgcccctcccctgtatttcatttttagcatcctgtatttgaagtcagcagggctcagcaggatttgaccgacagttacctcttgccttgagctcaagagaaaaaaaaaaaatagccaggtttctgcgcatgctccgctgtgacaactgcatcctatgattccaaacaggttactgtagaacatacggagcctcgccagctcattatataatgattttgtgtaaacgatagaatggggccgcagacatggccaggcggtgggtggaggaggggagagcccgagcgggagacccgcaggctgactcgcctctctgggctgccctgccttccctgcgtggcttctacgtagaagaggcagtgaacaaaacggaaaagccgtttccctcccggtgacacttgcttttctctggttgaatctttgggcaacacttgggaattctgccttttgcacttgttcatctattaggatttctaaatgaggttgaccatggaaaattaaggaggttattgatgttagttgcaggtagagaaagttatagatcttgtattagatgctagttaactcttgaattccttctagagctgcaaaggtggcttggtgtgggttttcctataatggacatgtggaaaaataatgaatccgatgttttaaggtacagatttttaataccaagtttttaaaaaatgttatattatcatttgataatatgcccccggagctcaactgtcttgttatcacgtggagacagtaacggctgggctcattgttttggagaacattattttattttgaaaattattttcctctctgaaaactgggtactttaaaaaaagtttaaacatttctattcatgcacagctgtcccaccctgaaagcaataatctgatggtagaagctaagcagagttaggccccggctagtccttgaatgagagaccacctgggaattctgggggctgtagggttaaaagaaaaataaattaaaaataaaataaattctggccaagtcataaacaaagagcccttcagagataccaggatcttaagctttgcttttccttcacctccctgccctggggtccatcctggtgtggaccctctgagctgtgagtcaaaggaggtacttgggggtgagccaggcactcgggggaacatgctggagcccctgagttcggtgggcatacaaggggtggcaaatgcgtccagtgggagggtggtatttggaggtgttctgggattccaagtgacccctcaagtgcggtctggtctctggctcagttcagggtatgatgcctttggtattttcttctgggcagtcgccttgggggctcttggtcagtgcattttcctcttatgtgcttaggatgcttaggcaggtaccaaggctggcagcagtgaaccaaagagagaagacagacagctgcgtgctaactgtgctgctgactggctcctcctcctgtttcctgacttcctcctaatgctaggagaaaaagtttctgtctctgtgttcctggtggaaatggagtgaatgcggctcaccacggcctgtgggtggcttactgactgctacagaccctccccagctaaacaggcatctctatctgcccaggattcaaactgcaatcacaggccactctgctcagcgcccaggaaaatattcccatgaacagcagccaggaacaatccaaacagggtctctttggcattccacatctatgaatgaacttactatgacgtacaatgtattgtgcagcacaaatcgtatgtggcccggtgcgggggtgggggaaggtcaaagacaatgcttcagtaggatagggaaacagaagagtgaaaggaaaaaatgaagagagaagatgcatgtgttttaattttaatgagctcaggaggctaaggagaaactcgctgtaacctacattgccggcagctctcatcggaggatgtgtttccagagagctggtctatttcagactgacaggccactgcctcgcatcacgcagttttcacgatcctattaattgggtgaggctgttagacgctgtggaggaaaggtggtcaactgtatgcattgctttgctgttggcttatttggggatggggctgtatgatttccttggtgtggattttcctataatggacaagggctgaaagatgccgaaacacccacaactcacccgtggaaggctaagcaatagtcaagggccgttacagaggcttgtggtctcagacctggaagcctctcagagcagggccccagcctggccacgccctaatcatggggtcttaagcaattcagaccatgtctctgtgcttccgatacctcctccgaactggagatggtcatcccacctcccagcacccctgtccctgttagggttgtggaggtaataagaggcataaactatataggttagagtttaatagtcacatggtaattgctggatcaataaacactattgtttataatcacttacctagcatgcacaagccattattatttaatactttacattgcaagtacttgattctggcttctctctttcttactcccaaatcagtttagtcacccagttttatcctcctggcctgtcccctttccttcacccccactaccaacagcagatccaggccaccatcaccccacctggctcacagcaggagactcttctgcagttctggtcctgttattccctcggggctccccaaagatctctagataaaatgcaaaacccgtaaccaagttggcaagcccttccccatggggaccttgtttgcccctctagtctcatcttattctaaagccccctactctcctgccccgaccctaccagcccaaatccacgctccagcccctgcgtttcttacaggtctctgaacgcttcactgtctcatgctggtgggactttgtctatgctgttccctagcagaggccaccaggagccagcactcctccatgtcaccttgctaaactcaactaagattctatttctgcagaaagatttcgtcctgcgtctccccatctcagggtctgtgttgcgttagatatcccttctgagttacccatagtatgctttccgcctggctcttggcttgacctattgtaattagttggtcttcctcaaaatgaaagaagcagatcataggcacacatggggaaaaggcacccaccaagagtcctcaaggcgacggcccagaggaaaataaccaaagcatcaagaagcacagctgagcttctcaacaatctggaggcacttatgctttcctcctggctcttgccttaacctattgtaatgagttgcctgttttcttgcctggggccagatcttgaacttgagcttgccaggtcaggggccatgtctgcctggctaattgctgaccccagggctttatctggtgctcagtttgtccagtgaatgagtgagtgagacagtgagtgagtgagcagatagtgagtctagcagagaaagtcagggtctcatgataatgtagatgggtggtgtggtggccattcaccctgtattagtgtgggcttcagccacaagaaagaagcatctgtccctgggcttcagcaggggcctcacacctgcaatgggtgcctggggagagggtgcagatgttgcgtggcagctggcctcctggggtggaggtggagaggacccacaatgggagagaagttgctcgagcaccctaggacttaccctcaactgcacacacagccatcgggggtcacgtggcagagcccacatctgccagcaggattgggtagaacccagcgcgttctgtgtctttatttgtgtggcaaggtggggatggaaatggacacagggaaccagacctagagcgcattgtcttgtcccacagctttgttgacatcccccctccaaagcccagatttggtgtttttggggctcttttggaatcaaagtgagctctaaacacctggggcagcagcatgggatcccagagggcaggctgaggggcatggcgtagcagctcctccaagaggccctgccacaggggcattgggaccagctgggaggaggcttcggggtcgctcccttggagtctgcatcttatcatcacaccagacccctaaggaaggcggatcccttgtcagacacacatacaccctcccagctctgctcgggaatgcggggaacccacttacgctggcatccaagacaccccacatgcccgggaccagcagaccaagctcagctttgtcagagtttcacttggcacctttagttttagccacacaatattatagtgcaggagctaagttttgatttcatgaaggacttcagaggtagaagatgcctggaaggggtgtgtgtgtgcttttggcactgtgagatgttctctctcgatttggaagacagcaagaaaaagcacagcaatttgctcccccagggttcttctgtgttttgaaggtacctgaagcttattgatttgctcacggttgccaggccattgaaaaagggtatttctttctttgcataggtacttctgggttcttggcaatcagttacagttcgtttgactcccaatggaagctttaaaagccaatggtagctacaaaagattaggtattctcttgatgcagtgaaatgaacacctatcttttttttttttttatgactcaaattctgggataacttctgctactcacttgattgtgagacctggaacacggtccttaaattgtctatatctcagtttccttgtttgtctaacatattaaaaaatgttaaccattccaacttttcagcactattatgaagaggtagcaagagagtagaattgtaagtgatttggaaattttaaatgcaaaatacaaaggccaatccccacaaaactcagcagctcaggtgatgtcattgctcctgagacatttttatgagattacgcgagaaaggcacaaaacagctcagtgtaaatataagtttctcggttttttatttcttaggcacctggtgtgtctttattgaggtttttaaaatgaggggactgtaaatagatcgatgcctatggtggccagtgttttcttctttgaggcaagtgatgattcatggattatagttttatgattagattttatgattccaaagtaagacttgtagatcagtgtaacactttaccttaagcattttttaatagaagaaaatgtgacggagatgacaaattcctctaggtgggcacatttctcctggggccaaaggtgctcctgcagtggaagaagtgttgctattaataaccaatgaccctgagcctcatggtgaatctcttcatgttctttttcttgatgcagcttataacaggtcttgttgcttcctctggtttttctagaatgccagcagttactctgcagagatgacggagcccaagtcggtgtgtgtctcggtggatgaggtggtgtccagcaacatggaggccactgagacggacctgctgaatggacatctgaaaaaagtagataataacctcacggaagcccagcgcttctcctccttgcctcggagggcagctgtgaacattgaattcagggacctttcctattcggttcctgaaggaccctggtggaggaagaaaggtagggagggcggctgctttgtgtatcaagctgggaggagcctctgaaggaggcaacaggttgtttgggcaaaatcggggtctggaggttgagaggctgagcttctcttcccaacgccgtcactgctgtggtcaatttattctattgctttctgcctgaattttcctctcctataaaatgaacaggttggatttggtgatctcaaagttcatggttgctctgaaattctgcgatgtcattatggagaatttcacaaagattgacgggtgtcaaagtgtgcctgtttctggcatgtgctgagagagtcctcttttgtggatgctgttcatgtccatctttcaagatggaactgtttttcaaccgcccagagcaaaatgggggacaggtgcccccctcccaagcgtgaagtgttaaaaagtggccagtgacctagactgacctctccagagacccatcttgaaaggattcttttgtgggtggttgtggtaggctagaaagaaaactaaactgttgaaaagagctgatacataaaaatagaaaaaacagagaggatagagctcaggaggtgtctggaacgccacacagtgcaggagtttgccactagcttgttgcatgttacaggaaattgatgagtggtagtttgagttttctcagcaaccttccctagctctagagtttcacagtttgtggagttaatgccgccctgggttggtgtgtttttttcaagcctgatctgtttcttctgtggaatttatccttcatctccttatgctccaagcactcattgtctgctcctaagtggatcagacaggtgggttgggggagctgataggcagaggacgtgtcagacttcatcaagaaaccatggtccctagtttctactgaatcatggaaagcaatttgaaaatctgggaggactttggaacaatacaaatgactcaggtacccctggaatatgctaatattttaggactttgaacttaaaactggattcagcccttctttcattttgaagaagaccaatcaagactcacgttttaaattttcagttgtctttcttcttttccctattatcttctttttgtttttctaccctcttgaagctaagtctttgagacccttagcatgggcagtcccatcttcattgtaatcacaattttagagctttgaaagactggtccctgggatctgcaagcccagttggtggctgggtaactgtatgtctgtgtttgcacaagcagaaacagattcagtaccttctcaacagacaacagtatagcactgtgatgtgatacttgcattttcagagcataccagcctgttctgttaagaaagcagctctgtggcaggctcagatgtgggcccactcctttgatcatgttgaaatttcaacatagggttctagaattctccttctcaacttaaagaaatattttatagaaaaatgtatcaagaaaccaggacaccgcgtcatgttttggcgtcgtttgtctatatagacaaattatggcaaagcagtgagcaacatagagcgattcctgtccgtctgttatgtgtggccttggaaatgttgtcatgacagtagaaaatgctgggaaaggtgtcttgtaaaatgaagatgggttgtaatgcagaaatgaagacatctgaaacctggtggcatctgggtttgaaatgtcttggcataagcctggcacacaggtgtagccagtgtttgcaagcagtgagtatcgctcccctacccagtgtgtttgtccattttcacactgctataaagaactacctgagactgggtcatttttaaaggaaagaggtttaattggctcacagtttggcatggttggggagggctcaggaaacttacaatcatggcagaaggtgaaggggaagcaaggcatgtcttacatggtggcatggggtgaggggagagagagagagagagcataaaagaacccacacacatttagaacattagatctcatgagaactccctcactatcatgagaacagcatgagggaaccgcccccaggatccaatcacacctctcgcccagtccctcccttgacacgtggggattacaattcaagatgagatttgggtggggacacagagccaaaccacatcacccagtatgtgacttgtcacccctatattctctaagtgtttaaactgatcacatgaatcatcacagttagccagctggtaatggcttgtagtgagggaggagccccaactgtccattcttaggagcgcagcccgggcggggtggccaccagatagagacttgccctacagtaaccttgtgtgctcaggcaggggaagagcctgcaatgggccgccgagggacctgcccatgactcagaaatgggtggagccagaggggttgacagacaggatatgtctgctgtgttccagctgctggtttctgcaggggccaagggtagttttgctgtctggcttcctacccactgccctccccagccacagcagcacctgcgtctgtcttccctctccctgctcctcctcccctgcctgccccatcctttcctttgttcctggtgcctacaattcagagtctagatggtttatcactccagcacacagaatagaaaggaaactgagacaaaggtggttaagggacttgcccatgctcctgggcttgaaaggggcagggctgggatgaggacagcaatttctagctctgtgcactccgacacagtggccatgccttgtctagcacagggccttatggggtgccagggtccatgtagccagcagggaagcagagctcttcctggaggctctggtgcccacaggatttcctgctgttggtggttcagttgccactgctgaagagtttttcctgccaaagggtgctagctgcagaagccctctctgtgcccactgttgtcccaacaccagcctgttcttgggtgctgcgtccagttggctccaaacttgggtaccatatttccccaaccaaaagccaggacaatcaataacagtgcgcattaaatgcggatcttgtgttggggctgcaggaggagctgcatcccactggacctcacccacacgggtcgccaccctcctggtccgcctctgcgcctgctggtccaccaagtcggcctcttttgcccctcccatgcatgggttcctcctgctcctgcttttgtccctccaattgctggcggtggtctcagtccccagccatgattaggttaggctgagaagtcagagcccagcctcactctgcatttctctcttctcacagtggcggagtttgtatttggcatcatctctgtgcgactccaagtgtgacgttgggtcaggggctacttctctgactgctctcagtatattcattttgctgtctgtatcaagtccattgttttcaacttttaaaaattcagtttgatgcattgagctaattgtaatgatcacgcggaggctggatgtcctggcattgctggggaggtgtctccgaaggtaagaagtgaagcagttttgaaagtgcctggttctggccgggcacagtggctcacgcctgtaatcccagcactttgggaggctgaggcaggtggatcacgaggtcaggagttcgagaccagcctggccaacatagtgaaaccctgtctctagtagaaatacaaaaaaaatagccaagcgtggtggcgagtgcctgtaatcccagctactcgggaggctgaagcaggagaattgcttgaatccaggaggcagaggttgcagtgagtcgggatcgtaccattgtactccagcccaggtgacagtgtgagactctgtctcaaaaaaaaaacacaaaaacaaaagaaagaaagaaagaaagtgcctggtcccatggttcacagtagggcaaaggaaacaggagctcgggcgcagagctgattcactcaaaggcagagccagggctaggacccagctattctgactccaagttccttcccattacaaagacactggaccactccggttgtttccaggaaagactttttctcacatgatttcccccaaaacatggtgctgcgatacaaacgcaacatacaacgccctagcaaagctgagcattgtgaccagaataactttatgaagtcctacgtaattattttaaagaaggagaacttcacaatccttacaagaaaggcgatgcgggaaacagtagcggcatttttaagaagagatgccaggcactgattctgtaaaacttttgagcttgacagttactaagcgttgaatatggcattttaacaaaacatcttgtattttcaattgtagttacattttcaccatatgactaatgatgtctttggagggaaaactagatcatataatagattcctagcagaaaacataattgtgagaggaactattctcaggagagaggagtacaccccaaggataatttccccggcctcagatacagtaattactctccctcaaggaattcactcacgtagcttgtgttgatgggacaaatggctcggaacaatatcagctttggtgctgtcacacaaactgcgctggggacagatcagagtgatctggtttatttgttcctcctcacccttaggtgtgactcttttgaaagcagccttttcttcctacagagtagacactatgttgagaacatttaggaatgtggttaagagtaagttcacagaataaaattcttcttaggtaaagatgatggggatgagcagattttatcgtaagctgctttcagagcccattcacacaagggtctcattttattagggcgtgattggccacagtgaacaaatggaatgcttgggtactcgtacactgcccatcccccaggagatcccggcggttcccacgcgtagttgactgaatgatagccgttcttcaatccatttggctcatggggccgattcaggaaggatctgcacattcttcctgtggaaacctgtgacatgaggctcagagacgtgaccaaggtcataggagtggggaggaaggaactcagaaccaggtctgtgggatttcaggccaaaaaggagcgtagcaagtgcttagctctgacgtgggcacaggactggaccaccaaggcacagctgtgcctagccccgtgttatgaaatggtgtggggttgccttggctgtaaactgatgtattttccttttaattggcctgcttggatgtcagcggccattggccatttatagggatttcctgtccctctggagaggctccagcttccctcttctcaccaggaaggggaggctgatgtgcatggcgtgctttctctccaacaggtgaagcgattctcagaaatcaaatttacctcccaagattaccttgaggcgaagttcaggttgagaacaaatgtagtcatatctggggctttagagcgttttctttcctatctgcagtcaggccgtggcctccacatggtgacgctctgatggaatggaatgtcgcctccttctttgaaacccaaccctccaggctcatccttgccaaaaaccaggaaggggttaaatattccgggcagcgccaagtcagattatctgtattggtttgcttctacgctataaaaatgcatttggacacctttctcaaattcggggttgctttctcttaatttctatagccatttcacaaggcctgtaatgacaggccagctaaagtgcatggaaggcatcatgaataaatcctttcaggaattccattaagggaagactggattccaaccaagtgctagtgacttgatccaacctgctagaacagggaggggaggcagcccggttaaaggcagagtgtggagatcctgtggctaggggttttgagaggggcagatgctcaggctgaagggggatggatagttccctagcataagtgagttacttttgtgcttctttgaggctgttgtgctaaagtgggctttcttgtgggcccacaggacatttcttttagtcctttgcctttaatggaggtgacagctgacccctggtgcagtgtcgtggccccaggccacttgcagggatggcttgcttgaggctggggcattgacaaagagtctgccttggagaattcagaggactggagaacccttctcttccccgctggggccagttcctaggttctcagtggcccccaggtgggtgggctaccactcaggccctgaggggtagcactcctttggtgatgaggtcttctggaacagttctgacccctctgccttacagggccccaaagaggctttgaaaaaattttgagaatggaccaactctcacagcagattcatgagagttgaatgtttagccgccatgtgcaagaccaaaggggtttgctactttcttggacaggcttcatatccaaggggtctagatgctcccctccagccagcacattttctccctgtgagcacgttgcaagggaaaccaaaccctcaccagcttgggcctgggatctgggtgtgtgactccttagtgtggcgttgttagcggtggcagcctccctggacaaggctcagatggctctgccaacattggccttggggtctgcttttctctttgccaccctcagattggcaggttctttatttggacatgttaatactttgtcattttcccagagagtgctcctgttcttgaaccatctggccccttcagtgcaactctgtaggactgtgctctgctccgtgggggttggtgtcactgtttaactgctggaggatgttcttaccacaatcgttttcacctgcatggtgggtgcccccctgccttcctctactgccttgaataggcttgtatcttgaaaagttcacgttctcaaatggaggccctccctataaaccagaacctaatccaccagtccaagaaatcaccaaaggtgacattttgctgaacatgacaccgtttcttttgtttataaattggcaggaagaaaaatgtttagtaaccatacacctgctctttctgagttcagttctagaatcaacagattagctatgaacaaagaaaaccatgtgggtcagattaaatatatcctgaaggactaaaccgtaaaactagggatttgtcatggaggtgcattcatcaaactcagttgatgaagttccaacacctgcataggaaacttactctcaaatacaatgtacccagtgccgactgtttttgctcacattgtgaaaaaacgcaaaaagatgggttttcagtcatgagtggtggcgggtgggcctgcagggatccagtctgacctgcagccaagagtttcacttcccactttgtcagctgtgtgctgtttgtcacctccgtgctctgtggggtaaatggcatttggtgtcaaaagtaagacacaccagggtgacttcagggctgtgattacatccagctgagacctatatttagagtccaaatcttggagccaaaaggagtcgtgctgccgtagcccgccctcctgccccgtggagggagccttcttgcaccatttctgacaagggacagccagcttctgtctgagcacttccagcaaccaggaactgacacctcccaggcagccgggctatgtttgcacaaccctcattcttagaaaatgcttctgtctgttgagctgcaatctgtatttgagcaatgttcatttgtggatccaggttctgttttttgaaactccgtagaccaagttaatcttggtcttgaaataagctcacaaatcaaggggaaaagcccagccaagtacagaacaataaccaaatacattacaatccagagctaccttgagaggaggaaataagaagcacatggcccttgcaggaaatgaggtcagagtcctgctttgggaggtgggcatcactgcggcatccgcagggtgcaggtcagtgggcaggcgcccctgctggaaggttcttgctgtctgtaaactgataagggtggaacccgctggaagggcagaacctgagtcacgttctttctgtttcttttactgttataaggcaacttggtgccttccaaccaaaaaagtccccctctctgatatctcaactgcctgtcttgaaagtgaaccttttggcaggagtttttatgggatttctcagttgttatttctctcctcccactgttttgggagaagtgtttttttttgttgttgttgttttaattaaaaataactggtgtttactgagcaaatcgtgtttgctttatttggcgctttgcctcattaagcctttggggagcagcatgggacacacatcagtatgggcatcttctccagaagggaaggagggtggagggggaacgagggcctgcccaggaccgctggcaggtagggggcaggtccaggactggacttaacacctggagtcccaactccctgcctctataagcgccactgagaactcatctctttgcaatcgctcagacccagataataaaataagctgggttgagttttccttacccaagacataaaccccaaaccctgctgacaatgaggagctacaaaaggcctctcctcctcctggggcacgtgttccgggaattctttcatggatgcaggtatgggggcatctttggcctctgtcctttgtctggagctccccgcacctggctgggggctgcactggacacctctgcccaccctggccctggggttatcaggccacctggcctccacccagacgttccctcccagggcgggattcatcctggcccgtggtgatgtgcaggctcccggaaggccgggctctgcccactaagtgtcagctctaacgcaggctctccatactgagtaaaaaagcccgtcctttctctggctggtgcaggtgctgactctgcaggcctgtggacgcagggtgacgttcgcgctcttgcccgagctcaacgcccgggagaaaacagcgctgccggagcccctcgcgcgcgcaggtgcgggcggggcgggtgcgcgctgccgcgcgtgtgcagcgcccgcccatccgccgccaccgcccgcgccggggttactaccggtcaacgctcgctagtaacctccgcggcggagcggcggcgcggggagcggcgcgattggctgcgggcgccccgcgctgttgccaagcgcgaggaggcagctgcagccccgagcggggtcgcagcctccctgggacaggggcggccctatgcataggggatcacccgggccatgcaaatcccggcgccccgcgcgtgctggtgttctcctccccaggtccaggaacaccggtccaggaagcctgagagcgctggcagtaggaagggtcgccagtgtggacctgagggtggaggtgttgccacccggggcggcctgcgctccattcaggcttgagcggtgactgggagaccccgggaatggaaatggcgctcaaatgctggtgtggtgtccgcaggggaacggcccgcgggtgtgtggagtctgcgcccctgtggcttcagctgcgtcgggggactgcgggaatcttccagactccagtttaaatcagagaggtgtgtccacgaaaagagtcaaactaaaacatttaaagagatttatcctgagtgaccatggcccgtgacacagcctcaggagaccaggagaacacgtgcccaaaggggtcgggaacagcttggtttcatacttttagggagacgtaagacagtgatcaatatttaagatgtacattggttccgtctagaaaggtgggacagcccaaagggggacttccaggttataggtaaatttaaatttttttctaattggttaagttattatcgatagaaagggatgtctgggttacgatacggggctgtggggacctaggttgtatcatgcggatgaggcctccaggcagcaggcttgagagagaacagactgtaaatgcttcgtatcagacttaaggtctgtgttgatgttaatgttacaggctacgataaggcatgtcagacggaccgccacttcccgtcatggcctgaaccagtctttcaggggaaattttagagtgccctggccaaggagggagtccatccccatggttcagggggcctttgaattttatttttgatttacaggtctttacttcaggtggcacaattttcctaggagacagttgatttttgattccttataaaacgtgctggttttgtttttagctgacagtgtggggtgaagctgtaagggagccagggcctcctggggttgatccaagcatgtctgagccttctctggggtcagcactgaaaagtggccagggtggggtttggaaccttggaattgcccttgggaatctgcagcgttggctccgctaagccggctggaatccggagatcatgcggcaaggtcacgcttcccggctgcctgccgagtcacttctaccctaggcaggttagaggcaaggacagatgacagctgaactttacggagtgttttccagggcatctattacagttttgtgtgtgtgaacccaaaagtgtgataacaaacatcatttccatcagctgtactgtgtttgagtatccgcaaggcctggggccacctcagtggagtcggaggtgccacgctttgctgtctctggagaccagggccttctctagacacccggcgggactagttcctttgggcataatttaggtgttttgtgaaatgttaaacattgtctttcagacgctttgctcaaccttttgggctcctgaccaaatgcaaagagacccaagggcttgcttttccttgcactcttgggttttcattgcctgcttgcttatttgattttgtgactgtggagctggcatttctgtaagcccatatagaaattacagtttccaagcctaaacccactaagccaacaggggcacacaggaaaccagagatggtggtggatgaaaacctttgcaacaagaaggaagggtacatctatgataactatggtgttacattactaaaaacagtaaggatgagtgtcactaacatgagaatgtactctacacaaaagtctggtgaaaaagggaggagccctttcactaagtttcatatttatcagcactcacgttaagaattacagcagaagctgcaggtttcctgtttctgaagacctgcgaatgagtttgtccagaaaatggccgtgtcctgaatggtgtgagcaggaggccatccagccttgtgcctctaggcctcctccccttcagttgtcataaatgtgccatgtgcccctgcccaaacccagcagcctttctctgaatttcatctggtttagagaggaaaatgggcagcatcattttgtcaccttctctcttcccaggggcgttctgtgcttcttgagaactatacctcaatatctgagttggctaagtctctagaatatgaatttcaaagagcttagcctggccagcagggctctcttggagccctttttctctcccagccctgcgtctccgcagccactccccatgggctagccaggctgaactgccagtcattctagcatttgtgctttctttgggccactctctctaccaagaacccacctcatctccccaggctaggggaagccttccttcattcacccttaaccctgtggccaggagagtctttcttggttactcttcgtactcctctgcccctacgatcatgggattatggcactcagcatgggattttgtgcttctcttctgagcttccaaaattacccctgcgtctcagctgcccagccagtgcctggctcagagctggcatgcaaatgaatgaatggaatcacaaaaagctaaatcacagtagaagagcctatacttttaccctcaaagacagcttggtagagaggagaagtagagaggaaaaccaagagccttgagatgctgggctgttttgatcttcccttgctgtgtcaaacccatgagccacctctgactaagcttcacgcaggtggtttctgagggctgtttctttggccgcacagcaccgtggatggacagaggggtggctggggaatggtaagagcctggattctgggtcaagcagcctactcttgaatgccagctccacctcttcttaaccatgtgaccctgggcctcagtttttgcatctgcagaacagggctgatccaagtgccaaactcaggattggagtgaggaatagcagaggtcatcactacagccagggctggcacacaatagtgctcaaggtattttaatgttacaggtcaaattttgctaaaaattgattttcgtgttcctggtttcatgaaggcaaatactcctctttctaataataatagtattagcttggtatttattagtctgtgagcagtaacttactctgtcttcacagcaaccctgcggtcaggttttctacccattctttttgagggaggaagatgctgtggccggaagcagtgagggcctttgcttgggcatcacagagagtgccatctcttacacaaaatggggatttcgaatctcaacactctgagctctgtgctttcccccaagacaggctacatgctccctggagttgtcctccaagagaatctttgtatggttccttttctgagacttctggtttcttcctcatggctcatattatgactaatttcagacgcgttaaatccctctatcttgagacttgtgtacttgcgtgtacaagacaggtaacagtcttattatttctgagagatctctcaagtactttcagatcgctggatgacaagctttgcatctttgaactatttatatttcagtatctacatttgtgagttactggatggaaatttccaccattcaaacaaagcttggcaagcaacattacacttcagaatttggctcacgggcgaggttgatgcaggttatcttaggaggatgtgagatgttatcagctcctgcgtgttttagtcttgtggctagatggtcatgactgaaaattgaggatgttgtgcccactgctctggttggcagctcgtggcagggagaggtggcagcagctctggggttggtgggagccacagtctcacacctattggcaggtcgtgaacattgttcttggatttgcaaatatttaatgtaaatccattaatgttgtagctttatagaaaatgcacttactctcctttgtggtaattctaaattaatatgtaacaaggaggttaagatgaattgaactatatgtggagcttagttaaaattttctttctcccgctatttctttcaaaaaaatgattccaggtgtagtacttgttagcaaaatgccctcagtaaaggaggaggcagtataggatagagctcaggaatgtgggctccacagtaagagagtctgggttcagaattggctccaccgcctactagcagggcaactgggtgacttacccctcctgtgaaaaggaaatattaataataaaaatatccatcttattagatcaaatagcttgatacctgtgaagcactgtgaccagcttgtggcacttaataaaccatggctacccttcttatatgtgatgtaataaaatcataatagcttagaatcactaagatggatcaaagccttttagttctcattctaaatgtgaagtgtggcttgataccttaggctttagaaatgaaagggaaagagcaagggtatagttggtggccactgttgatttagtgtttcctaggcgccgggcagtgtgctcagagcctcacacctatgtgctcccatgagcctcattgctgccctttgagagtggaggggcaaggggaggtgtaggggcctggtccggggtcacagggctgtaagtagcagagccaagaggtgacccaggtagctgcttccagagccccacactggtcccctggctgggctacatcttacctttgtgtgtctttggtgacccatgctcctagagccagcttccggttggggcagaagaccgtccggggcctggcccctggctaatacgatggctactgctcatctgctctgtgtcgtagatgctcacatcacttgggtgatgagcctttgtcacgtggcctctgcagaatcagctagctgggcaaggggcctaagctccggaaggttcccctttggtcatttttgggtgtctggtgattgccaggcttccagtatctcaccactcaaattagagccccagaaagggagcatggtgtcatttcatcccctgggccgtggttgtgggagcccatggtgccttctgcagggcactggagaacgctgtgtgtgctcatcttgggacaggcaggagaggagggcaggtggcaggatgagggcggctgtagcctgcaggtcacacagtgttatgccagaccacggtgcctgccacgctgggtctccaacggccacacgaggcactgcttccatgttatcagtgaggaaactgtggcctggagacaggtgggcgatgagttcaagttcctgctgccaacaggtggaccccaggaccaagcctagcccagttgacccctggctcctcctgtttgctctttgagatcatatgaaacagccagtgactgcctagggccatggcccttttcagtgaacttgaaacattaaaatgtttactgccttcacacttatggcttaaaaagttgtttggtttgtgttttctttgagatggagtctcgctttgtcacccagtctggagtgcagtagcgcaatctcagctcactgcaacctccgcctcacagattcaagtgattcttctgcctcagcctcccacgtagctgggattacaggcgcccatcacacccggctaatttttgtgtttttagtagagatggggtttcgccatgttggccaggccggtctcgaactgctgacctcaggtgatccacccgccttggcctcccaaaatgctgggattacaggcgtgagccaccgcacccagccagaaagttaattttaatgagaatgaagccgcatcattgaaaagtctgatgagcttgggagttgtctaatggtggaggctgccagccaggtctcatgacctggaccagattaagccctactgtccatcttcagggagagtaaacagcgtgaccagcacgggccacgcttgctcacacccaccagatgtgcgttcccgcaccacccaggggaccgagggcacaggtggggagttaggagggaattcagggcatgggcagaccctctgaaggaatccaggaggcttgggatctggaatggacactctgggctgacagtcaacagtcctggtgaatagcatgttggtctctgggactcttatccttctgactttcacagacacgtagtgagagcactggccacgttcagacgtgactgcctgtcaggattctgacggaggtgaccctggctgggccaccagctttcagcatccatttatcgtaaaagccaagtgcacagtggagatgcttttctccccacaacatccgtgagctcatcataaacagaaacggggaaattcatcagagtgtgtttctgtgaggagttaaaaaatccacagggcagtaatcccagcactttgggaggctgaggcgggtgaattacttgaggtcaggagtttgagactagcctggccaacatggtgaaaccccatctctactaaaaatacaaaaattagctgggcatgatggtacacgcctgtagtcccagctactcaggaggccgaggcacaagaatcacttgaacccgagaggcagaggttgcagtgagctgagatcgcaccactgcactccagcctgagtgacagagtgagaccctgtctcaaaaaaaaaaaataacaaaaaaaaaacaaaacccaaaatccctaaggtgtttataattttatactgtttcctaagggattctcttgcattaaaaatgccctgctgggtgcagtagctcacacctgtaattccagcaccttgtggggctgaggtgggaggattgcttgagagcaggaggtcgagaccagcctgggcatcagagaccctatctctattaaaaaaaaaaaaaagccaggcatggggcatgcctgtggccccagttacttgggaggctgaggtgggaggatcacttgaggccaggaggttgaggctgcagtgagtcattatcacaccactgcactccagcctggacaacagagcaagaccctgtctcaaaaaaaaaaaaaaaaaaagaactccccatggtgtttttggttacttgttttacaaatatgcctgccattgaaagcacaaaacagtgaaatccctttctaaagtatatggggccagccacaaagtagactccagtacattttattttaagcaaagttacaaagcacatgcagttcttactactgtattttgattttctgagtttcctttaggaaatattggctttttaaaaagactatacaatgggcctggcacagtggctcaggcctataaccccagtgctttgggaggccaaggcaggaggactgcttgtgcccaggagtccaaggccagcctcagcaacatagcgagacgctgtctctacagaaaataagatgagcagagcatagtagtgtgcacctgtagtcccagctactgaggaggctgagcggggagggttgcttgaggctaggagttcaaggctgcagtaagctatgatagcactgctgcatactccagcctgggtgacagcagagaccctgtccctaaaaacaaaacaacacaaaaactcaaactgcacaatgagagaggaggagggagctgtattatagatgtgtggtacctggaaccaagtggtgacgctgaggagggcggaaggagcatgatgagaggtggctgggtgacttggctgctggagaacgctggccattagggcacattcattctgttccggctcttgtgttatttcacactttccacatcccagtcctttagagccgaccatgaaccggggcagtgaaccatatcgttgtttgttgtgttttttggtttttgtgacttcagaggctgaagtgcaatgaggcaatcaagcgagctccaccatggccctgagggcttgtgaaaatgcaggtggctgggctgcacccccgggggtctgagtgagcaggtttggggcaggcagggttccgtgtctgataagtatggggcgatgctgctgttgctggtccagggatcccactttgagaactgctgaattagagtaaagaggagttgatggccatgtgggagccaccctgagccctgggaaaactggagcaggaggtggcatcacccacacttgcaccacaggcaggagtgagggccctgctctcccatggtcaggcagcctcagcatctcaccactccctggccttcaaagtcagctttccttgtgaacctgggtggtcagagatgcagacagcagggccaggtggtgtctcacgagtcgcactatgaatgtggggagcccgtcggcccctccctctgcagggaggagagttaaagctcatgtcctccagggtaccttcctcgggggtggtggactgctgcacgccagggaacagggcagaagtgcctggattcagcaatttatattattatttaagagagagcagattttatttttatcttaatctgtttcacagaaccatattttaataccgtgtgtgtgcgcgtgtgtgtgtgtgtgtgtgtgtgtgtgtgtgtgtgtgtgtgtgcgctggtttataatatcacctgggcgggataaagaagattaggttcctttctgcttatttgtaaaacctgttcaagctgcagtaagattgtcatgatctccatcatcatctgatttatcccccagccagttcctctgtaaaatctggaaagacagtagttgctgaggggctgcaacagaggattggcgtgagagtggagaggtttttgcaggattcccggcgccctgtccagacagcggtggtggagagaagcaaagagaagtgcagtttctatctaaactagtaattttctttcctcttctgtaagccctctttatctttggcttttttttttttttttttttttgagacggagtctcactctgtcgcccaggctggagtgcagtggtgcgatctcggctcactgcaagctccgcctcccgggttcacgccattctcctgcctcagcctcccgaatagctgggactacaggcgcccgccaccacgcccggctaattttttgtattttttagtaaagacggggtttcaccatgttaaccaggatggtctcaatctcctgacctcgtgatccgcccatctcggcctcccaaagtgctgggattacaggcgtgagcccccacgcccggcctatctttggctttaaaaaaatgttttaaattgctcttttcttgctaaaacatcactgtaagtgataaaattatttgcagaggctggaacatgaggttagctgggggtggagagggcatcctaggagtggacatgggagctcacagggattcaggagggcatccagaccctgaacttccttcgtcccctcccagtgcaaggttctgacaagagcctgcctgagcccttctctcagtatttagtaacactcgatcctaacagaagaaggtcggccatttccaccgtcctctgtgccagctctcaggaccagattagaaacacagttaacacagccattgccttgccaataaattgataaagctaaaagacttcaaaagcttctcttctgcactgcatttcctaaagtctaatttacagtcttgtcttactttgcaattcccactcttttttttggtgaagaaattgagcttttcctcatctaaaatcacggcagattttgagttgcaaggatcacaattagtgaattttaaaaattatacctggaacaggcacatggcagtggtcgtctgagaatgagctgggaggtgtgaaaccttcttgccactgacactcaaggacagggctgtttacatgacatccatttccaagccacagaaagcttgggaacacccacttagagctgagagtgaccttccctatgggagaggcacacttacaaagggaacgaccgtaggcaggtgaaatccccaccttgctgttggaacccgagcttcagagagggctgttgacttggctggagccatccgtggaaggggtgcattgaaaccacaggtgagaactccatgtgggaatccaccaccctctgagaacgaccctcaggaagaggacctccttccccagtcatgtcccagctctgcccccacgcgctccacgagctcaggcctgcagtgggagctgagcgtctggagtgaggagtggtgtttgccagaccttgtgttccctgggctgcctggaggggctcctccagtgaatctagacaccccacactttgtaccagggagtggaaagggtgatatgaacttctgcatccgaggacttctgaaaagccacagatggaagaaccaaagaaaacaggatttacttagaaggttgagcctctccactggctcgcatataggtctaacttacaaggaacctgttgggttgtggtttttgtagttataaaaattattaaggaaccagaaaattgcattcttctccaattggttttaggcattcagtccagatacaaggattatgaaacttaaaaagcagcatcttaagcccggcttaaccccaaacaacatcttaaccccagtgaagtgttcttgaagggtgggtgcggccacacatcctgcaatccagtgcagaccagatggcctccctggccaaccacggggacaggaagaagaaggacagaggacacaggagagacaggactgagctgggttcccatgtggtgtgagggaggcagggaatggcccagaaggctggatctgcaaacaggagtcgcatcagagacagagaagagagcacagctcaaggctgagataagaccaggagaactggggctgtatttccttatctattcctgagatccatgctttctgaaaatcatctgcacatctaagcatcttggcacaactccgatgaggaggggatggggcaccaggcagcagactctgatgaggaggggagggggcaccaggcagcagactctgatgaggaggagacagggcaccaggcagcagaaagtgctgactcagcagcacaagaccacatggccggcttcccttcttcctcggaatggcctggaattcgatcaagaacagcagccccaggagcatcctagagaggtgggggcaggcgggggacatggtgagggagggagtggcaactctgggcaggtggcaagagccagctgatgagtacagggagggagttcccttctccacccatccacactgacatctggggaactcatttaagctacagatgccagcttttggatttgcagaacggtgcagtgactgaattcgccatccaaacacttagaagaataaatgcaccagtttctacagaggctgtagatataaagccatttctcaagaggaatgatagttgtcactggatataggatagctttgaaaaggaaagattatggagatatttgtcacctctttaagatactggcaaaacaataaagctgttctaataatttacctgttaataaatattttcataaaataatctcagtccatgtgcaaaaataataaacaatgctgctttgctctgatggctaaaagaaagagattctcagttccagcttttcctcactgacgtaaagggatgggatatcatttcatgagcttttaagtttcttcatcatttttcctttcagaaagtaacaaatgtaatttcaagatacaatggcgtatgtgtatatatatgaatatgtatgtattgatgcttctatacataaagacacatgtatgattatattttaatgagagcactttttttaagtcaggaaaagaccttaaagattcatatagtccacgctccacatttcatagattagaaacccaaggcgcaggctgagatttttagtttaaaataaaccagtttttgagatgaaattctggtactgccacatctaaatttgaatcttatatgcctgtatttatttgttctgagcaagaaggtttgattccatcattaattaaaaagtctcaggcaaccagactgggataagtttttaaaagaaaaaaaaatcctacaattaaaatgaagccacaagacttagaatttgaccgtgattttaaaactattctaaagaaactttgttttacttcaagttagacgtgactgtctaaggtaaggtatatgaactattataaacttcccagaaacaatttctagctggtcctctttctgtttcttggtgagtttgtgtctttctctgagtaattttcaggataaaaatatttgaaattcttttttctattttcattatggggaaaaagcatcttgtcttcattcaacaaacttttattatctgttataagcaaagtatttttgctcagtcttggggaggaaaaagtaaagatagcatgtccctcaatgagtttataattgatagggacacaaggagctctcactatcaggcaggggttatctaagacagtgaataatgcccagagaagggttataggaattggaggaggatgagaatctctggagaaatcacagcctttggaaaaggccacaaagaggggcagaacccgggggcacccggtggagaactgagcaggtgtggtgtttagaatttaggtaacgggagagtatggtgatgggcagtcttggaaatggactttctgggaagcatttgggtggagatcttggactagactggtgactatggtgtagtgggttgatggtgaccctccaaaatggtacatacatgtcccaactctcagaacctgtaaatgtgaccttattcagaaaaaggtcaatttgcagacagatgtgattaagttaaggatgtccagatggggccaccccggattaggatggattcaaaatccaaggacatgatcttacaagagaagaagagaagaaaaagtcacagagatgcaggggagaagagacagagacatgtggaggagacagccccatgaagatggaggcagccgttggagtaacacagccacagcccacagacgcctggggccagcaagagcctggagacgcaaggaaggaccctcccctggagcctccggagggagtgtggcatcgcggacatctcgattttgaacttctgccctcagaacggtgagacggcacattttgtggcattttcttggggcagcctgaggtcactaatattatacaaaagaaaaggaagcaaagatggtcatgagagagcaacgttttgaaaaagaaaagtggtaggaagcatagagaggaggataaagaagattaggtttctttctgcttatttgttaaacctgttcaagctgcagtaagattgtcatgatctccgtcgtcatctgatttatcccccagccagtttctctgtaaaatctggaaagatagtagttgctgaggggcctcattagaggattggtgtgagagtggagatgtgtctgttgcaggactcctgggacctgtccagacagcagtggtggagggaagcgaagtgaagtgcagttctgtctaaactagagaaccctggagcaaggaagactgtgaggcaccacccgtggggggtgcagggcagctgccacagacgttgtttggcttcatgaagctgagttgaagatacgcaccctctgtggcccagcattttcacttcgacctgaatacagcgctctcagcagcactgttcataacaacaacaagactggatatgacccaaatgctcattgaaagaagagtgaataaaccaggcaggtgcggtggctcacgcctgtaatctcagaactttaggaggccgaggcgggtgaattgtttgagcccaggagttcgagagcagcctgggcaacatggcgaaaccctgcctctgcaaaataaaaaaatttaaaaaattaaaaaaaaaaacacctgggcatggtggtgcacacctgtagtcccagttacttggggggctgagggaggactttttgagccagggagattgaggttgcggtgagccatgattgtgccactgcactctggcctgagtgacagagcaagacctctctcaaaaaaaaaaaaaaaaaagagcgaataaacaaactgtgatgggtccacagtggaatattatacagcccagaaaagaaatgaagcacagttacaggcatcaacaagaacagatctcatggacaagataatggagagggagaaaaagcaattcctggaacacatgcaatgtgatgccttttctaaaaacttcaaaacattcaaaagtcaccaaaattgttaaaggataaatacgaacgtggtgcaagatagagaaaaacaaggatgtaataccattcaagagagtggggacatctggtgaaggcaggggactgggatgagggaggggcgccgggcctggggtgtgttgctgagattaccgcctggctggctcgtgggcacatttatttttcattgatttattcatttatttttcttcctcacatctcacaagcaagtgatctgcacagaaagtaagtgtcatattgtgtgtggactccggagccagaccactcagtttaagttctgtttctggtcggtttcacttctgcttactagctatggttcttggggaaggttattttaggtctctggtgcctcagttttctcatctgggtgtattgaaatatggaccttgcagggttctggtgagaattaaatgagttctgtgttgagaattaagtgagttaatgtatgcgaaagcttagaatcgtgccctgcggcatagtagatctatataagcatcagctattgccatcatcagcatcatcattttgtaaatgtaaggcagtttgaaatcaaaaaagtaaaaagacggtatggagctgtaaagaagtgagagggagggccaggcgcagtggctcacacctgtaatcccggcactttgggaggctgaggcaggcagatcaccagggtcaggagtttgagaccagcctggccagcatgatgaaatcccatctctactaaaaatacaaaaattagccaggcatggtggtgcacgcctgtagtcccagctacttgggaggctgaggcaggagaatcacttgaacctgggaggcggaggttgcagtcagccgagatggcgccactgcactccagcctgggtgacagagtgagattccatctcaaaaaaaaaaaaaaagtgagagggggatgaagagtcctcactgggtgaggaaggtgcccgtgtgttgtgtgtcttgggtcacgtgtgaacacatatgggggtgcagggggagggggcgtttaaaggattctaagtctaaaccactgaggactcttggggacaggaggagagatgaagactggaggaggaactgagggtttctagctgcgcgtgttgaccttctcctggggtggcacatcccattgaagccatgttcccaggggacaagcagagtggacccagctctttggggactttggtgcttccagtcttattttgaaggcattatagagggggtggaagccagatccaaacccagttcacttcccattccctgccccatgcctcagtggtctttggtttcccgtgggtgctctgggcatcctgcatggagggggactccaggctcccagagataggcagccgcatgcagtggtgcccaaacgtggaggagcacagtccagctagcctgttggaagagagccctgaaaacagggctgggacctcccagggaatgagtcaggggccacccatgagcctccctgcaggcctcctctggtggccgctcatggtcattgagattttagttctttgggtcacacacacagtgagcgccagtggacagaacttgcctgtgtgaggtcagggtctctcccgcggtaccctccatgtgggccattcctgagtctcattttcactgatgggaacataacacaaacgtgctttgtctctcttgcacttacccctttcctccctggcatgctgtgctgctggcatggaggcagggtcaggagcccaacaaggggtgtgtgcggggtataggaaggtggcccccagaccccgcagggatcggcttgggagagacccaccagacacatgaagggaagcaacagcagcactaagtggtattgctggcaggaacggcagggatcacaacacaaaggcaacaacagaaacgaacacagggacagctcagcgcccagcagacatgaacttgcctgaccataccctgtgaggagctagggctgtcactatctcctctggaatacagaggcccacggtcggtcggtgacctacccaggagggaagtgggattcagacctgactagtttgcctccaggccctactgttttgactctcctgatggtaaaatgatgagtctgcaaattgaacaagtgcttggaggaaggaggtttgctttaggtttgggcaggaaagggaggacctgtattcatggaggcccaaccgggtggcaaatgcttcacagtcctgatctcattttgtctccccagcagcaccaggtggaaggaggtacgtgttgttacctcagtttacaaatgagataacagaggctcagcgagatacactaagttgtcttaagtctgaagatgaataaggactcgatgtaggattagagctgtggccagccaccgtgtgaagtttacttgcttcttggggccacaaaactggctcgatgagcgggcaggacaaggttgggatgatagggtggtccttttcaatgggatgaatggcagcggccaacgcatgtttgggagaccctgaccagaccagcctggtgtgggggaagtggaggcgaggcggggggaatgggaaacgtgtctggaagggcccaattgtggaaagaaggccttgaaccccaggcctaggcacagtcggtcctagagggagacagtgggggcccacccagagagagctgggagactcagaatcccactggagcccctactcttcccaggcaggccacgccagcactggccttgggcatgggagggcctcccaagtcatgtgcaggcccaaagtccttgctttactttacaagacaagcacagagccgaggcccaaggcttgcatgtggcatcatctccgtgtccgtcgaatctgaaaggaccagggaagctcaggaagctgagttcagaggcatccctctgcttggcagccaccctgaccatgccattgggttgctggaaaccccagctgtggaaacggaaccgctgattctgaagctctccccgcaatgcttcttggatgtggccatgcacgggggcaagggtttgatgagagcatctgtgccattgcccggacaagaaggagctgttggctgtcattctttccagaaatctcagcaatgtaaatgttcagggagagcaataagacctcgtggttgccagccaactcctgcttctggaagctttccaaatctccctgtgcctaccattgtgcctgtgctggatttctgcttgtttttcctttttctttcagagtttgaatttgggtttgggaggatagtaatttgatatattagagcagcgataatcgctgtcattaagcagaacccagctccttaatgtctgtgtgtggacgggccaagtgcgagccagtgtgtggggctgggatgcctgagagcacagagaaacacaaagccagggccgccgggcagctggggcaggttagggacacttctttcgttgtcctgtttgagactcagccatggctgctttggatggtctctggttggtgttggactatgatttttctttagcgggggtgactctgatgtcattcagcttggagatgtgtcccaaataaacctttaatcacagaaaaggtgcttggaaggacaaggggcaccttcctggcccggtgactgcagcttggggatcaccctcccattgcctggctttccctcctactttccgagcaaccacctcttgggtttggcgttttaaggtttccccacttggattttaacccccattggcagcaggtttaggaaagccatcagagggaagccctcctccctgacatcatccccgcccaggtggtgttggggcgagtgaggttctggtgctggggaagctgctgcttgaggatagcagtgggaagaagtttcatggcagcagctgccacctatgtgttctgcagagcacctggcaggagagactcgccttcccagtctcggcacgcctggatgccgcattagcacacagggagggtcatggtcagagcttcaggatgcagtgggcgaggtgtctaagatccagatgctagccttggaggagctggtgggacaaaggctgttcccagggattgcacctgcctggccctgcatccagggaggatcctttcagctggagatgccggaagttggcagagctggggtaaagggcagaaacataaagaccaggtcagcagcagctccaactaaggcagatgcccagagcagatcagagaagcagaccagagatgagccggcaccgctgtgggggaaggatcatcccagccatcatgtggtttgggggaaagctgggaccccacttggtacaatttaggaaggtacagaagaatgtgcattccatcatgtgggttctgcttctcccctgaagcctctgtcaagagctgctttgggtcttggtatggagaaatgccttcatttggccagacccatctggcagaggcagtcacgatgccattggacccccaggcaagcagcccctcctagagagcgagggtcttggaaggcctggtatgacccccatgccactctgtttcctagggaaccctaaagggaaaccgcacgtgagggactccactgagataaccctgacgtcaccgtgccactgtgccccttgtctgcagggtaacttggctttgaaggagcatcaggggaccctctgtaggactgggggtgagatcgatggacctgccagctgttattgttgggattatagggaagtgaggaggtcgtgtgtgcctccttggggtctgagtgcctccttggggtgcctaagggagactgaacatcattttggtgatatttattgatgtaactactccctttgcacgatatttattgatgtgactattccccatcacttgtgggatgctgagctgtgcatagcacagttcaaaatatctgatctaagcaggcaggaaggagacagctgctggtgctgcttagagttaggcgcagggatgaaacccatgagatgaggaggctggtggaggaaagggactgggggcagtggagggatggagaaatggacagaagtatggatggggaatgctgaatgtgagggagaccccagaaccggatgacacaagaaaacaatccttggctgtggccgggtgaccatgttaaggccattaaagtcatgcttggagaaaccacatagatgcttgcagctttgcctgtcatccagtggacttcagagcacagcatccgttcgaaatccagcggcagattttcatagtctgacaaattaaatcagctgttctcctggcgccagagtgggcttcctgccccacactcactgaggggtggtagggaggggtggcctgtcctttgcacactagtgggcaaatgatactgtcttcattttatgagcagttcttgccccctgtgacttagaatccctcacgtgtgttttgagatccattttgatgttattaagcccaacttcccagaccttcttcctgttcttcttgttggcacaaaagcccccttcctgtttcagaaggtgcaaaaagcaagaggattgatcagcgcgtggctttgccacatgatcacgaaaatggaggcggtcgatgagaaggcccttaggcattagggggaagaaacaagtagagtaaaaaggaaatgtcactggatgtcatagaatatggatttctgtcctttctgccttgagctttctcttggggagggaggaagaggggtctgggagaacaagacagcccgttctgagcagaagcccctttcagctctgggctgagatgaatggggagcgagggggaggggagggagtgtagcgcagctgggctcatcccatcaatgttggcatccaaagaaaaatcacggctttgggtggggaaactgggtcctgctgtgtagttttcagattgaagttgatgtgagacttggagatcatttggcaaccttattggtgctattggcataatttaaataatgggaaggattttattcttaattgttccagccaggtttagaagcctggaaaaagaccagttctgcttttagaagtataaaaataccgcagggatggaaaatgcttcatgcctgacaggcagatgtaaatgatttccagttatatttcagtacctgcgcaggggcagggccccgttgctagtgatctgatgaactagtcagccagtggggcgcggtgtgcagggggcgtgtgtgtgcacacaggatgtatgtacatggtgtgtctgtgcctacatatgatagtgtgtacatggtgtgtctgtgcacgcatgattgtgtgtacatggtgtgtgtgcacatgatgcacatgtgtgtatatgggtagacgtgtatgtgatgtgtgtctgagtgcatggtgtgagtgcacacatgtccatgtgtgggtgtgtgtgcatgcgcgtgtgcctgtgtgcacatggtgtgtgcatggcatgggtgtgtatcatggcctgtgtgtgcacactgtgtgtacagggcagacgcactcactgagggccccttcagttgtaataggcagaaggagcgcacgaggaggctgaaacgccagttagaatttcagctgtgagctcttctcttccccacttagggctgggatgttttcacagaaatcacagagcagctctcagagcccaaactcattgtttctcctggttttgtttgtgttgactttccctttaatccatgctcaagcccctcacctgtttagaggggatgtggcccgactttcaatgaaaatctctccagttctcctgccgtggcctctcgggctcctggggaacagcaccctgagccttctccttcttaactggtgagttctgcagagaatggggctatggttgatagtgtagtctttgggaacttttgttattggacaaatgtccactttgttttctaggacatctctttgtgtcccccagagtgaaccagctggagccagggagcccctagagcagtagcagccattagggggagccactgggagtcaggtgccttgacttggatccaggtgtgcaccctttctttccaagggtctctgggtgaggcccgtgaccttcccaagcctctccctgtcttgtgaaacctgggcgtgatatacctcccttttagggctgctgcgatcatttaggcagattaaacctcataagtggtttcccatacaagaaagatgctagcagtgcaacagacagaacacttacctgcctgccctcccgccaggaggtggtcttccaacttttgcccggagtctacagagggtgggccctctctgctggggctccgggacatggtcaggagaggttggtctgtctgtaccgccattctcttggccagactgtggtgtctggtccctactcacaccttcctgtcagagtatccagaggccgcagagtatccacaccctggctgggtgtactggctacagatggctgtggctccaggtcacctgcgtgcctgggtgatgagaaataatgtcacaacaaatatcccatctgcattctctgggacactgacccatgaagagaaagcagttctcacagtttttacaggcacaggtcagctctcagagtgctggggacagggttcccaccaggcagccctttctgctcctcccagagactgatggcttctctgcattcagagggatctgggagcattgcaggaataggctctggctcttcagaaatgatcacgagcttaaggaactgggtctgcaatgtgaagccttaggtccactctccttggtgggagctcatgccctccccaggctccaggacccagtcaggattcttaattcacgtggctatgtcagcgcagctgtcactcccggaaatgaagagagacccctcttgccgtccttctcacattgcttgcactttccagcatgcattttgttgtgatgttttgtctgtaattgcaactccagcagcagccagtgtttattaaccattttctatatgccgggctcaatgtgaggcatttcgaacacattctcttgtttggtcttcacagacacccttaaggttaagtactcatttcatgcccattaccagatgaagaaaacaaattttaaaaactcaaggaacttgcccaaggtcacacggctaattagaggccgaatctagagccgatttggaaatttcagggcccactggaatctcctgggtcatgccccaggccaattccttcagaagcgtttctcaaactccccaggagattccagtcaatcaatttgcaggcagctttttgggaacccagctgggctggagtctatgtagaatatccatggcacccgcagcctctgcagcatctggcctgagttattcttccattgcccggtgctatcatacagatacaggactggtgactacaaacagtgttagcaggacgtacttggagctcatttggcagtgggagtggacgtgctgggggccatcccccttccacctgaagcgttcttgtcctaaagcatgttgctgagacagctgtgtagggcgtggcggtgaccctggggaaggaccgtactgagagctccagactccagccagcctcctcactttggccacattccaacaatgcttactgccttccacagtggatgaaatattccagaaatcagaatgtgttgaaatgtgtggcaaagaagaatgtcatacttgcatatgtgcttacactggccactgaactgcatacacagtcccaagaggtctccctgcaccgcgaggcccatgctagaaaaggcgttcttcaggaacagactgaggcttcatgaagatccttccctccatccatcactccattaatcctcccctccattcatccctccactcatcccttcatttactccatccatccttcctcccattttcccatccactccatcagcctctccatccatccctccactcatcccttcatttactccatccatccttcctcccatttccccatccactccatcagcctctccatccatccctccactcatccctcaactcacctcttcatccactccatccatccttccacacttttccccatccactccatcagcctctccatccatccctccattaatcctcccctccactcatccctccactcatcccttcatttactccatccatccttcctcccatttccccacccactccataagcctctccaaccatccctccatctgttcctccattaattcttccctccacccatccctccctttatctctccatctatttctctctccatccctcccttcatgtcttcctctatccctcctccatccctccctctattcctccctccatccctctttccatctctccctccatccttccctccatcccaccttccatatcccccccatccctccctccatatcttcctccatcccttcctccatccctcaatgcatccctctctccatccagagttcaccacaccctgagtccccagtgctgcactcctgaaactcactctgggatttgcaactgggggttgccttgaacatgttccctgtgtatccggttgaattttggaaacacccatatctccatccactctatcagcctctccatccatccctccatccatccctccattaatcctcctctagagcattctactagagaacagccgaggtcagccttcctctgcctctcaggggagtagggcgcctgctggcagctgctgtaagactcgggatgagggctgccccctgcaggtggctctgaaagctgcagctctgagtggtgcccccagcagcagctttgttccctaattaggagggcacagtggctgtctagaagcacccaggagggagctgctccagaactttctttatcagctgacaaatcaaccttctcatgtgaggggagtttgagtcgttcactccagaattctggagaaccgtaggattcggagctccttgagggcatagccagtgctttcccttgttcctggtggtgatccaagcttgcctttctctcagacctgcctcagttgtcctgttctcataccctgttttcccccaagaacacagggtgcatccccagccttagctggattttcttccaccttgcaaaggcccctgcctgggagacatgtcttggtgtgagagagacgacattgcgttcccagatgtcgctggtgctgggctcagctccaaagttctggagcagagtcagcaaagcacagcctggagaccagatctgtgctctgcctgagtttgtaagtgaagttttgttgcagtagccacagccgtgcatgtacaggtggcagctttagcttctgctaaactggagagctcagtgtttgtgacagactgcgtgtcctgcaaaatcgaaaatgtctgtgattcagctcttcagggaaaaagggtgccgatgtctggcctacagggctcaagcattgtcatcatgcccccatccaaccgtccactcaaggtgcattgactgaggctggctggctggagtcatcatgtgggccctcaggctatggaggcaaatcgagtggcattgcctctgcggagctggccattaccttgtttcctaactgtcactcatttgataaaaactgacaaggttgctagagccacgtgtttgcaaaccagtgggcattcgcacgtgcatgtaatccacacagttactcggtgatgggagtatacttgagggaaagcagctcacagatttgccacttgccacaggtcatggtttaggaagaggcagaggtggggtgttttctcattagcccattccctcctccctttggatggaagaaaggaaaagagcaggggagagagaggccaatggcaaaggagcacagcgggagaaagaaggcccccaggcttgagcggccctgaagctcagcagctgtgggttggacggtggtgttggcttgctcttccccttccctcctggtttcttcaggccagtgcggcatcctgcacgtggtcagtccaagtccagggagggccccatcacctgggggtggtcgctatcagtggcaaagtcttgtcagcagctcatggggcaggaagggcctatggttgggggtttcctggcgatcccatggaggaaggtgaggatgagttgtgttgcttctcgggtgaagctggtcacgtggccctaaaggcattcagagtagatgctcacttcaaccctgcaggtggcattgggcggcaagcatttctaggacccagcttccaccacggagccgaatggtggcccggctggggccagggctcctctcgagggggcctgagatgctgagacccatgacgctgctgctcctgccaggggctcatcacctgtgaaacacaagccggggagcctgagtgtggcagagtctccctccccagggttccctctgcaggattttgtttgggttcttttgaagttgaaaagattttcaaaagagctcaccagaatatctaaaaccatgttatttagggaggagaggagccgcatggaagggccccaactccccagtgaccccctccaccaaacgcacaccaactggtggcattagaggtgacagtgcagcaggatggacttcttacttcccctctcagtctttgcactcagccccaagcagctcctgccaaggagccaaggagaggaaaatatcccttagcaggaaggaaggaaaatagaggcatcccagaaactgaacaaggacccagaaagcaaaccccacctctgttcccccatgagctacccacttttccccacagccccacagctgtgtgcctccctctctcccattttctttttttttttgagacggagtctcgctctgccaggctggagtgcagtggcaccatctcagctcactgcaacctcctccgcctccctcgttcaagcgattctcctgcctcagcctcctgagtagctgggactacaggcgccagccaccacacccggctaattttttgtatttttagtagagacagggtttcaccatgttagccaggatggtctcgatctcctgaccttgtgatccacccgcctcggcctcccaaagtgctgggattacaggcatgagtcaccgtacccggcccctctctcccgttttctaccctctttcttcttctagtacggtgaggtgggggcgggtgctcttgtcctccttccccctctccaccaccccccctctcccgccccacccaggcagctctggagtcctgctggctgcaagtttactaaacggaggcatttgtgaggggatttcagataccctgctgtgctcaggccagggtgacagtgttttgatgtttgcggttggaaagctgacctcctggatgtggggtgacgggagcggccggtgggaacagtactgtctgcatggcatcttctcccatgagaaaggatgactcctgagaaaacagacaagcaggatagcaaactccatcgcagactccctggcctggtcgaaggggcacagaatccacaggggcctgggggaagcttgggcagctccccaccccctctctccactgaaaccccgagcgagagtccctctgtgtatcggggactgcccgcttgtgaggagacgcattgcctcgctctggcttggaagaggaatgtcctgcctggcccggccccctcgggaagctggcgggtgagtgaacaagacaaggatggtgaaacacgctgcaacctcggccgcggagctccataaacacaggatggcctcttgtccctgctgtttatccacatttatgtttatggcgtacttaactcacggagaggtcagaacgctgagctatcagagtaacatttgacatttggacaaccacaaaacaaggccctgattctctgcgggtgcccacttcacctggtcccagcccagcccagtgcaggtggacaacacgcctttgttggtgctgctgggaaacaaaacccaatgaccgatcttccccagggtctctcgagaagcagccggcccctttccaaactgcaactcgttcaatgaaacctgagtgagctagtcacttgcttattatgttctgcaggtaaccaggactggggggttaatggttcccaaggggctcagatcccttggttgctgggcaggtagtaggagaggtttttctcacacgaagccttagggagcatgcatttggcttggggaagcatacttcctagcagaggctgcaaggagtccttcatgtaaacagggcttgagtcctccgtaagggacaggagaccttcccacatcctggcaagaattcttcttttttctgaggatgttttgtggaatgaaaaataaattgaaaggtaaaggtcagttgcacaagtgaagatctctttgaatgggcataggaattcttacggccgtagatttcagagcatctcactgcatcagcgctgccagctaccctgcccacacctgggtggtattcttagccttaggtgacccacggggtttcttctttatgaggggaaaggcttgaaattccttctgatcctctgttcaatatttcatgcgatatcagactaaatgcacaattctggattgagctgactgtattgattcaatgggaatatgcccactcggaggaggagggagggaggaggggaacggctgggaaccgctctgcggggcctggcaaaggcactcttggccccgggtgcaagagccgcctccgggtttggcagaaggggttggaatcttggatcctctgctgacctaccgtgtgaccttgagcaggtcattaaccctctccaagctcttgtatgtcacctgtaaaagatggagaagaacacagtagtcgcttgctgtgaggcctaagcggagtgacaggagcaaggctggcgcggtgcccaccccagtgagctctggcctggtgaggcccgttctgtgactcatggcctctgccaggggactgggctggccctgcctgtgcctccttcaagggcacatttctacagagtgaggaaaactctcctagccccgagcgatgctgccgtgtcccccgactcttcctaggtgttgacagttgacaggtctcggttctctttgcaaagcactgttagctaatgtaggaaatgtaaacattcagtgccttcctgaaattccttctagaccggaaccaccttgttccaggggctgtctggcaagtggtatagcccagccacagcagctaacagggctcatgggattactggggggtaatctccatctcagaaaggtgccttgacttttccatgggcaaaggaatgttgccttcatttccaagggaggaaaccgtcttttttattgtttgttttggaaaagttgtatttctttgtttaaaaatcaacacctttgggggtttactttagatttaaaagtagttagccctgaagcgacaggaaggggacgtgagggagctcctaggagtgggccatgtcccagttctgatctgggggctgggaccctggtgtgttcgatctggaaaagcatgtgaagctgtgtatttatggtctgcgcacttctctgtgttttctacacctcagcgacatttacagcaaaatgtaattactcagaagtgaacacaacaggcacatttccatggccattgtctacgggtttcctgatgacttctgtctcgcccacttggggaggggtttgtgcttatgtaacacaagacagacggagccagcaaccccgtaaaaatgcctgaagtaggttgatcctgccgttagactgtggggaggggccaggcggctgggcctgcagtggcctctgggcattgcctgatggctctggtcccaaaggggtctgtcctgtcagaagggaggtgtgggaagagacgacaaggccacggcgttgcctgagacgggatgttgctcaaggttcatttgtgccaagagcccttcctgtcttgtgagtgccacgaacatttccttccagtaaccattgtgcaggctccattccaggttcgcggggcatgataatcaagaagctggtcttgctcacgtcctcatggagctgacattctcagggcctccagggcagtgacagagctggaagcagaagaagacgtgcgtcacatggcggctgtcggatgccctgctcatctggggtgcctggtttggggttggccagctggcctttaggaggagcagcttcattccagcgttatctccttatactcatgatcaccggaattcgggatgtctgcacaggctgtctctgaatctctaatgttctaaaagtggctcattctgaaggaggggataactcaggaaactctttagtattcacttaattttaaacattactaaatgcttcatctgcgtggtttttaaacatctgttcatccatccatctgtctgtccctctgtccatccatccatccatccttccatccatctgtccatccatccatccgtcaatctatccatccattcattcatctattcatccatctgtccatccatccatccattcatccattcatccattcatccatctgttcatccattcatccattcatccatccattcagcgacacttgagtatctacactgggccagggccgaatgtttagagatggaaaggtgaggttcctacttctcagaggatgctggcaaaggaaaggtgaagggcaagagagagaaggtggagagaaagagagagaggaggagagacagagaggagagagagggagacagaggagagagggaaggaggtgggggagagatggccacatggggaaagggggaggaccaggagagaagagatagaggagcgctgtttggggtgctggttggtgtgctctggggagctctccagggtcttgactgggggcacgtgcatggggagggttgggtcttgggaagccttgacaacaccaggactccatctctggccttgaggccactagctctcatggtttctgcccgtggtggcagacagtgagtgggagggtgccacctcttgggccctttggctgagctcctcgagatcagagccagcttgttggtgctcgcttgtgctggccccccatccccatgcaggacagcttcacaccatctttccgagtgcacacaggggttcataggagctgcagctgtgctcgggcagggctgcaccccgataacagagtccagagtgctcaggccctcacgtccctcattcctgcacccacaggtcagtttcctcctggaggctgcatccagtgcagcagccccgggtgacgctttctccctagcattgtgctctgctgtgggttgagttgcatcccccaaatagatatgttgaagttctaacccctgctccctaagaatgtggccttacttgaaacagagtcactgcagatggcattagttaagatgaggtcatgctgaagtagggtgggcccctgatctcatatgacagctgtctggataagaagatgggaatttggacacagagtcacagatacacaggggagaggcccatgcgcagacagaggagagatcaaagggaggcagccacgagtcaaggaacacctggagcaccagcggctggcagagacaggggaggtcctcccctagcacgttcagggggagcacggccctgagggcacttccagtgaggacttccagcctccggggctgtgagaggatgagccctggaaaggggtcagctctaacacaccacagggcggcctgaccactgttgacttctcaggctttccagatgtgcacctctggtccactacaccggactgcgagctggctcaggaccgcaggctgggatggcctggagacatttttctccacctctacagtcagtggtgtcctgccggccctggcctcccccttagtgaggcagccccctcgcgcactgccatagcttgcccctcgtggcttgagggattaatctataggcctccccttcctggacagggttcttctctcttaagcctggataagtgggcttgctcttggttttgctttgacagtggacttgtgaattgcaatatgaagctgggtgtggtggctcacatctgtaatcccagcactttgggaggcccacgtgggcggatcacgaggtcaggagattgagaccatcctggctaacacagtgaaaccacatctctactaaaaatacaaaaaattagcctggcatggtggtgcgcacctgtaatcccagctactcaggaggctgaggcaggagaatcgcttgaacccaagaggcagagtttgcagtgagccgagattgcgccactgcactccagcctgggtgacagagcgagactctgtctcaaaataaataaataaaataaaataaaataaaataaaagaattgcaatatgaaattcagccaaggtgagtctgattaggagggtttgggatcaaggtgcttccactgctccttttatagtgagtagctctgaaggaccagcatgctctgttcctgtctctcccaagtatgcatcatcttagggaacaaaccataaaaggggcagagatagactctgtgggttgtctttggaatatcccaagggatttgctcctctctgatcatgtaggtctgcggctccaagggcagtccgtcaccaccctatctggagcactcttctatcctcctcccatctctgtcctctggcgatgaccacagccccgggcactgctagttgtgccccttgctaagctcccatattttgtgttaaggagcaaggattttcacaggctcatagagcatttgcttcctttctagggtaattaagactacactagaaaccatcttgtccggttctcttttacagatgttgacattagggccccaagaagatacgtagcctgctggtgtcacttagggaattaattcctgagcaggtgtctggtgcctggggccctgctcagaccccattctctcctctggttctcgatggccctcacctcccatttctttccatttcccagaggagtctggttgaacttatggctttttttgccttgattaattgactatgaatttatgtcccctaaaaaaggattaagttgcatcatttcttcttagcatgcagtgctcagagacaacccagcaattgataaagactttagggttggtgcagggaaagggggaaacagacactgattaaagataaatggggagtggagccttcctcccacccaggctcacagaggccggccctgcccgcctagcgctctcgcgggttctggtctgcagtttttatctgagttccgtttagtgtctggtctgaggctctggtctggtttgggttctgtctgggttctgtctaggtctaatctgggttctctctagacctggtctgggtgtggtctgggttctgtctgggtctggtttgggttctgtctgggtctgatctgggtctggtctaggttctttctgggtctgatctgggttctgtctgggtgtggtccgagttctgtctgggtctggtctgggttctgtctgggtctgatctgggttctgtctgggtgtggtctgagttctgtctgggtctggtctgggttctgtctgggtctgctctgggttctgtctgggtgtggtctgggttctttctgggtctgatctgggttctgtctgggtgtggtctgggttctgtctgggtgtggtctgggttctgtctgggtctggtctgagttctgtctgggtctggtctgggttctgtctgggtctggtctgagttctatctgggtctggtctgggttctgtctcggtgtggtctgggttctgcctgggtgtggtctgggttctgtctgggtctggtctgggttctgtctgggtgtggtctgggttctgtctgggtctggtctgggttctgtctgggtctgatctgggtctggtctgggttctgtctgggtgtggtctgggttctgtctgggtgtggtctgggttctgtctgggtgtggtctgggttctgtctaagttctggtctggctgttctagtctgcggctctggtctggcctgggttgtgtctaagctctggtctgggctaccatctggctgtttcaaatactgaacctgggcatcctgcacggggctgatgggccttcactgggcctggctctggcagtctctgcacttgttatcctgggcactcactatcccagccagaaaaacagtggaagacagtgtgccctgtgaacgagagcccacaaggacagggaggcaggtgcatgtccattatgccaagaagtgggctgagcagagctcaggggtgggaaagtagggcaggcggggtgggatggtcgcatcttcgctttatatttctgtaatgggaaccaagtggaggactctgcggggagggtgatttccttacataaatagaggtaggggtgtgtgtgtgtgtgtgtgtgtgtgtgcgcgcgcgcgctggatactcaggaaacccgactaccacaggaagcctctggctggtgtttcctgggcccctcagcccaggactcacttttagatgtgcacaaggtcactgttgtacccgggctgtcccacagcagggcagactaatgtttactggactttgtttccagagccacttttaagattcttcaattccaaatgcatgtctttttttaaaaaaaagaaagaaagaaaaataagtttctaatattagagaagtacagccctgaattgggttttgtgtccactgctggaccccatgagggccaggtggagtggacctctgcagccccagttgtgtgcactctctgtttggtgcaaattccagtttgctggttctcaatagcaagaccagcctgagaccacctgtcctgctcttcccatgagagggccgaatgctcccagcctccatgccatgtcctgttcctggggtcctgggggtcattgcagcctgtatgtgcttcctccagccagggtgatcatcgggtgccccagtgagccccagcactgagggtcagccccaggcactgtcaaaggtgagagctcagaggctgtgcccagaaagagaggtgggccctgcctgccctggacggagggagagaggcttctcagagcccgaggcatgaaccctcaggtgggtcgtggccatagtcagatgatggctgctggtgagctcagtgaccaggcgtcttcaggcagctcataagtttgagaggacacagcctaagggaggtttgctggggagtagccccacttccaccctgaatagacaagagatggtaaagcaggtacccagcacttagtgctttcttggggatatcgcgtgggtccccgggggcctgggtgcccgaagtgccgcagtactccatggtgcagagagcttgctcctgtggaggaagtgtctatgtggtccccagctcctctgtctgcctgtccactgaggggcacccatggctcagcagaagggctattcttggggttcccggtcctcctccagccccgctaatctgtgtaggcctcaagtgctgtgtgtttgtaagcattgtcatccacagtcctattgtacgagctggttcacccgcagctctgagctgctctccagccccagccctttcttcctgtgcccctacccccgctgggatgactctcctcaccctccctggggcgacaaccgccctgtctgtaatgagtggcagtcccaagcttcctgactggcttccgcagctctctgactcccctaaacaaggcctcagggactccacatccaaattaaggcggcacctggtggcaggttggcattttccggtgtcctatctatgaaagacaggaagacagctgggagcaaactcccctgggccagactcttggaaacataaaggcttgggtgcccagctggggaccgggagaaagtctaaaacacgggactgggccaaggaccccacaggtccctgtctcattaggtcccctgaaacgtgtggaagctaaaatggcattcacgtgattcttgatcatttaacagtggattctgatctgatactacactgagaagtgcccctgggccgggcgcggtggctcacgcctgtaatcccagcactttgggaggccgaggcgggcggatcacaaggagattgagaccatcctggctaacacggtgaaaccctgtctctactaaaaatacaaaaaattagccaggcatggtggcaggcgcctctagtactagctactcgggaggctgaggcaggagaatggtgtgaacccgggaggcggaacttgcagtgagccaagattgtgccactgcactctagcatgggcgacagagcaagactcagtctcaaaaaaaaaaaaaaaaaaaaaagtgcccctggattgggagacattatctatgcatccagttgcttctgttttattatttacagcacttttaaacagtctatttgaaaaaaaattaatgtggctttgcttgggatgtgcagcttttccccttttataaagctctcagatggagacttggcagaaattccaaagcagtttggtgtggctccaaaatgacaaactttcttaattattaattaagggattaataatatattgattatttaatcatatgttgattatttataaataaatcatatatacataatttatacttatgtaaatatataaagcataaataaataatttgtagatgcagtaagtgaattattaattaaaacagacacatgcatggcatctcggggcaggagcaagctggtagtgctgcagctcagagctgggttctgcccatactggccgagggcttgggcaggtcacctgggcccaccggacatcgcttcctcactctgagacgggaatggtggattccccatagactagacaatgagtgggaaagtgctttgtgagctctaaagcattacacacgtgctggtaattattatcattattataacctgtgaaatgcaattgaagacgtagaccagggaattcgaaagacatgaagttcatgttcttccctggaatgcagccttttctatgatgcatgtcaaaggttgcctttggccttggtcatgtgtacttgaacatttgcatatttactgcattagagataaaatgaaatgaatatgaatatgatctgcttttttgcaggatacaagaccctcctgaaaggaatttccgggaagttcaatagtggtgagttggtggccattatgggtccttccggggccgggaagtccacgctgatgaacatcctggctggatacaggtgagcagccctgcccagggcgcaaagttctctcccgggtgtcaggccagcagtgggaacagtggagctccttccatcagccccatcacctggagcaggctgtggtctacagcagtagtccaggggagagagtgacattgagaggctgcacttgccaagggccatatgatgggtggagagccacactcagagaggggtccctggagacagtggccacagcagcaccctggatgagctcagcctggctaaagggacaggaggaagtaggaaggtcaagttcagggagaggggtggccagagaacttggagagaacaggagtgaatgcaagttgaagagagacaaggcattttcagaagagaatgagaactgtttggctggggcttgtgatggtcttagttgtttagaagtttgagccgggtgtggtggctcgcacctgcaatcgcagcactttgggaggccgaggtgggcggattacctgaggtcaggagttctagaccagcctggccaacatgatgaaaccccatctctactgaagatacagaaaaaattagctgggcgtggtggcaggtgctataatcccagctacttaggaggctgaggcaggagaatcatttgaacccaggaggcagaggttgcagtgagctgagatcacaccactgcactccagcctgggtgacaagagcgagactccatctcaaaaacacacaaacaacaacaacaacaaagaaaaacaacaaagaagtttggcgaccattgtgtccaatgtcatccatttgggaatgattagaaaacttagaatctttagaagtgtttagaaaatgctctgttaaagtcagttattttcatgtctgattggttttatttactaactttggcaaatagtaataatagtaataatttcatttactgaaaaaatggcaaatatcacccttttccttagagcttctgaattacaccttaatgccagaaattggggtttgaaaaaacctcacttatggcaaattcctgcctgtgacagtcacatctaaaggttgaagttgaatcctcagagtgaggcagggccagagaggagtggagtattcttgcaggggtggctgtttctcagatcatcaatacacccacagctcctggcagcctgtgtgggtgcttggcatctcggagctgcagaggccactcaggatggggccttcagacctggggatccaggggaagccagttgaccccagcctgtgcctggaggagagaagagacccggccgcaggcccacagtcatagtaacaagctgagtaaagttggaagctagacatgctttcattagtctccgtagattcgcctctgttttattccccataacgtctaggaggtagggctagagagactggatccttagaagcacagtgtgtagactgcctgtggcatgcaccagctcccgggctgcactgatgctcccagaacggcaggcagcagaggcgcacagtaggtctgcagtgagccgatgaaccagccagtgaatgagtgtgcctggtgaggccgtgcctgccttgcatgagcacctgggaggctctcagcctgctcagcagagagaattctccctggtggagaagggccatccactcggctgagctggtccgggccccaggcccctctctgctccttcccaggcctgaagtctgcagaggtccggcctttgggcagttgggtgtagcctgagctacacacagaattgttcagaagccaacgttacaaacccccacaaatccaggggctgtacatcctgacctcgcggctgcttataggaccatccctgccaatctttgtttggcaggtcaagaaagtgctgccgttacccttagtataaacacaccatcccacggaggcctgtgtgcagcttcctcttcccagcaggagctttctctgtggaatgtcttcctcccgatcgctgcagtgctagcgaggtccggtccctttctgcccctcggggtccccgtggccagtggttcagctgggaagatgctgggaggcaagcccccgtctctggctcccctctcctgccccgggaggtggaggaggagcaggagcccggctgacggcttctcctgtccttggttctgcagggagacgggcatgaagggggccgtcctcatcaacggcctgccccgggacctgcgctgcttccggaaggtgtcctgctacatcatgcaggatgacatgctgctgccgcatctcactgtgcaggaggccatgatggtgagctccgccctgccccgccccactccgcccctgccgcctgtccccagcgcccacattagacacagcactggccgagtgcccagctgcgagggacccaagggctctgccacgcggcctgcacagggccagcaacctccctctagcggagttctaacaccagactcgctgttgggacaggcagcatcatcccaaaaccccccaagactgtgagtttaatggaccttgtttggcagggttggggtcaagtttctgagaaggttattaacccggctggcttgggtgatcctctccagggcagccaccatactatttctcctgcaggccagtgcttgggattctccttcctgtcagctatccttgagtctttccgtgtctttggcccaagcacccactcgcctggtgccttggtcaggataccaagggtctattcctctgactcacctgcctcccaggtgggaaaatgaaaccagcagtggccgagcatctcctgggtcccaggccctgagcacatagctctacacacaccagatatgtcatcccaaaaaagtgggtgggaaatggagcttcccccagtgaagccaggagcccagggtcacacggctgctgatggccacacgtggccagggctgtctgtctccaaaggcgcacctttaactgccagctcagcttccctgccgtgcacctgctttatcctcacagcctcagtgtcctcatctgcaagaccgtatggggttggtgtaaatattgaaagggaaaatacagggaaggtggggtagaattctgacatgcagttggtgcctaatcaattcaacttggtcactgtttcttttcactcctagtaagcctccccacagtatcttcacttatgtcctctgtggataaatccagtatttggggaagtttaaaaatatcttcccctcttggggccacagaagggtccaggggatatcctctgcctgggtttctggaatagctggttgtgctccttggacagaccgcgacccagccaagtgccatgcatctgggtttccagggccttttttttttttttttggggacagagtctcgctctgtcaccgaggctggaatgcagtggcacgatctcagctcactgcaacctccgcctcccaggttcaagcgattcttctgcctcagcctcccaagtagctgggactacaggcgcccaccaccatgcccggctgatttgtgtatttttggtagagatggggtttcactatgttggccaggctggtcttgaactcctgacctcgtgatctgcccacctcagcctcccaaagtgctaggattacaggtgtgagccaccgtgcccggcaggggccatttttttttttaaaggcccaactcatggcgactgaaaccacacagacctaactgtgagcagaggcaaccaccagaatcctcccattaagaggagattgaaaatcagtgtgcagctccagttgccagtcatggctggctttatgtgggggactgtttatatttctgcttcctccttgttcgctgcaaaagaagagtccccaggcttcatgtctctcctggcaccctagggggcatcctcagcttgatctgctctgtgctttggtcagtagatgggggttcgccttggttttccacctggagagaccctgacttgggttgggcaaagcttcttccccatggtgtctgagagtggcacgtgaagggcagtgccaaggggttcttagctcagcaaagagaagcaggttacgtttgcagacacatgatctgctccctaaacttctttgtggggaaacagaagcaggaacctgtggggctgttcccattcgtgttccctggtcctgcgtgttctgtgggtaagcagacgccattcccctgggcccagcatccctgggcggtgtgtgccccatggagccctgactgctgatctggcctccaaatggatgttcagatggggcgcagaggacctctgaggagttggcgaacagatgctgcaaagcagtcgtgaagtttttcttgaccctaatgttcactgttccatgtatgccctaagtgcaaactccatgcacaccctcttgattcctgaacagctcctgcgtcttgggtagcccgagtttgacttctcagtaagttcttgagtgaaccccatggccacatgctcgagacccttcactgggaccgcagctcaatggctgcattctccacagatgcgactagggactcctgctgtcctctcccaacctcgccaccgaacctgctgtgaaatgatctattttcacaatcaaattcagttcgattttgattctgagaatttcatgaggccctggagaaatactctgaggctatggtacatgttaccactcaaggtcctgtctcacacggaggagatattggccgcccgttgcggagtccggatcccacatcagacacagttgtgcatgtttatgcttttcatccttgcagccaggcagactgagaaatggcaggcagtgtcacatggcaggagcgtgggcctgaccctgtccagctctggggcctgagacctctttgccccacaccccgcccccctccccgccaccgccctgcatctcaccctctcctctgatcctcacagcaacttctctagctaatgaggtggacagagcttaacctcaccattgtgccagtgaggaaatggaggttgcacgtttgcccaaggccacgggaggcaggagggtggaagcaaggcccgtcctgtgcatggtgatctactctgggttttcccaagcagggccaggagcccagtgctgtgttagcaaacgggatctcaaaaaacacaacaacaacaaaacgcggcatcctgacgtgtcgccctcgtaaattcctgtgctgtaaagactctcctgtggataagttcaagcctcagcagtttaacaggcggtttgtggaattcctaactcgcaccactggttccgcccaggctggtcgccaagcccctgatgcctggggctttcttacctctaaatggcccacatctgacttctctcctgggtacagcagagaattcaactgagatagcaggaagcatcgcacatggactgctctcctgccatcctaccattgttaaagcaggggcatcggaagccaagaactccttgggttttccatgatgatcagctagctgcacggtggctagtggcaccgtggctagctgcatggtggctagttgcaccgtggctagtggccttatgcctagctgcactgtggatagctgcaccgtgactagtggcaccgtggctagctgcaccgtggctagcggcattgtggctagctgcactgtgggtagctgcaccgtggctagtggcactgtggctagctgcatcttggctagctgcaccgtggcctgcagtgcgggcatgaggctcacactgccagtggccgtctgttctgcttccacactgttgtccttgtcccctgcaggtgtcggcacatctgaagcttcaggagaaggatgaaggcagaagggaaatggtaagtgggttgtttggtgcccacaagtggtccagaaagtgcatgacgtgcatgtggaaggtgtgcctgccggggcattttggcattggcttttgtttgttgatttgtttttgccttgccttccgtgtgtgggacaggcaacatttcagggagtgctgtggcctgcagcagccagaggccaagaaaggcagatctggtgcacacgctcatggctttgattctcagattcaggagtcggaatgtaatgtgagggacaacagacttggcactcatggggccagaagatgccagcttcagggttagaccaagagtgctgcccttttagtgtttaatatgatcgatattaaattttttataagacaataacaatgaagatggttagtcattcgtttaaaaataaccaccctccatccacctacacttgcaagaagaaatttagttcttacatgttattaaccggcctcttaaaaaagaaaataaatacgtttccaggatgatgaagactttctaatccctttagccattttttttttggcttcctaaacccagggagcagggacagatgcaggtgggcagagccagggggagcagcagaaagccacacagaggaaggaggccaccagcctggactcacacaccctccacgggaaacccactgtcctcctctccactgcagctagtgctggtgggattttcagtgtgagatggaatttggggaaaccccccttctataagattatctttctctcctaacacccttaaaggctcacagtctggcagcagctgagagtggggtttgccgggttagtgccaatggctcgacatggccctttgtgttctggtataaaatgaagtgattgatgggacagagtcaaacatactgaggaacagtcatagcaattctatttccggcatttccccctctccggtcatctgtaatagctaatattaagtaaatgtaaaccactttggtatggaaaaaaagagttggacaaccttaatgctcctcctcccccatcaactgtgcccttcaaaactcaggattcagcccgtgtcaccggggctggggggtgaaatgcccggtgcaggtggaaagagcctaatgtctgagagaaggaaaatgactctttgttgctacagaaaatgttctgtgtggaattcttttattctgagattgaaaagaaaatggatgagtggaaaccaaaagagagaaaatgtggaaatcacatgtgttcctggcccttcatgggggcagaagacccagccttgtgagtttattgtctaggctgaaaggcgagagccccctctggatagtgttttctaaacaatgtaacgtagacacccccccacaacacacacaccacctcccaagcccgagaatgttacttataccaagttatggaagatgagtgttatggcctgaattccccccaaaagatgatatgttaaagcctacaccccagaaacccagaaatggctgtatttgaagatcgggtctttacagaagtaatgaagttaaaatggggtcatatgggtgggcctcagtccagtctaactgtgtccctgtaagaagaggagaggaggacccagacacaccaagggatggccccgtgaggacacagggaggaggcggcatctgccagcccaggagaggggcctcaggaaccaaccctgctgccctcgatctcagactttggcctccagaattgaggcgggagtttctgttgtggaaaccagccagtgtgggggacttcgttacagcagtgaacgtaacaaacgagagccttagttccaggcacacagaagaacatggagaaaagcaggtgtcagagctgagtctcggcgaagtctcccatgggagatgaacccaaatcaacagaacggggccctgggattgagccagggcgaccttcactctccctgtctgaggtcagttttgccaccccccagtcctgggccctccttgccatcagctacaggacaagaggagaggccggcaagagtgtgcagggcccccatgaagcagaggcttttccacccggagactcaagaagctgctcctcccgaagcctggatgcagtgcccctggatccgcctttcagggccctccttcccatcccccggcctccctgctttcatggggtgtcggaagcacaatccaatctctttgtctcggatagccctccatcgaggtcccaaagacccctccagatgctggcctgcaagctgaggggcggctgtgggggctccaaggagagacggtggaagtggtcactgatgctcggcgtggaggaggagccaagagctctggagagggaggcgctggagagagggaattctgtctctctgacccaaaataaggcccaaggacagagcaaacggtggagagggtctcggggatcaccggaggccgggggagcagacgcaggaggcggagggcggagagacttgctaacacggagaggccctgtggtgaagtagagctgagcacacgggggagccctccatcctggcctcctggaacccaccggatggccttgggccactgcctgctgtgccccgagccgagcttcacctgtaacgtggggacaggaagccaggccccacctgccttttggggcagtgcaacctgaactggatggtttctttaaggtctctgagctcgatggagcccatgtgatccatatgggaggggctgtgggattgcttccctgcagcataaggcgacagccaccagccttttccggggtagctggtgaaagtcgctctccccatgggctgggcgcacagtgagtgctgctcagcaggctccgtgctgaagtcacagcaagccaggcccttggcctgccggagctggaagacccagaacaagctggcatcttggtggagaatggaggcgcctcccaggagtagctacacgggacccgaaggcagatggcacccataggtgtgtgtcctcgtggtgcctgggccctgcctaagacacggcccggatgagagcctccagctattttcaactgggtttacaagggcaaaaatatcagctcatgtggctgaatcatccctgaggggtgagcccctggcgccgtcctcagattcctcttcggctggattgaacaatgcagagagccctccccacaggacctggaggccacgctgcgtcctgcacatgctcctcaccagcagacccagctgttcctcagccatggcacaggtgcatgcctcgccatcgggcccaccatcaggattgcttcaggagaacagggcagcaactttgtgccttcactcacttccctccaacccccgatgtgcacctaggtcaaagttctctctctgtctcatggaaacacaatgggatggaatgttctagaagatcatggaatttttgctgtgttgttcacggccttccttaattcccagcaaagcagcctcagccctccagagccctccagcaaggccacttcctcaggagtgaggtctccaggggcagcctgggctgccgagatcctccctggagcgcccgccgggaagccccaggggggctggagctacaagtggccttgcaggttttttgtttgtttgtttagggaaaatgtataaataactgagatcattgtttgttctttctgactagtctttaaaacagaacccttctgggtggcatcactcctgagcggacactggagaaagtggggtgggcccagctcatgggcaggggtgcggagggaaaggcacccacagcggcctccgcttccagcatcccctccgtgagggtggagggagagaagaagatgtgccgcatgtgtggggcccccacagtgagcctggaagcaccagagccactcagtcggccaagagcgtcgcccagtggttccagaagatctggaggcctcgtcctgggaagaccagcagtcgatgccagctgggaagagggctctgcccaccttgcacgccccccacccaccagccttttccagacagccttccagaagctgtttctgggttggcggccctcagagccaggcatccagcagaggcaccagggctggggtgagggcatcagcaaggaggttcaggacagggctggagcccaggtcggctgaccctgtactgccacctgccctggcctgtccagcagccgtgccccggttctttctgtcaccaaagctgcactttgtaccgactgtgcataaataattcagaagctcagagtggaaattttcttcctcgtgagttcttcctcccttcagatgacttcatctccctagaggagccgctggagtagggtccgcttgctatggctcccaggggccggccaccacagggctgccctggcagggtggggacaatagctgggtgaatgctggagggagctccaggtgggctgtccccagggtagggaggcagggatggcagtggctgacccagggcctgcttctgagatgatgctggggctgaaagcagcaccaagccagcacagaaatctgctgaccttcgtgttccctgagtcgatacaggatcaataatccggagcagacagggagggctccgtgcgcagtgccctgcttgttcctggcgtgcagcctgcttcccagagcctgtgccgtggtgtggctaccgtgggtcatgactgctttgaggggtactgcagatctgtttcgttgccttcctggcacctcagagaccttgctttcaagtcaaacctatttacaagaacaaaagtgactctgtccccctccccgagagccctggtgtgtgtgaccgtgttcctgcccttaatgcctacctcagcgatgacaagagtgctgggaacagcccccacggactccatgctgctctgtgcactctgcatccactctttcaagtaaccatcacagcgaccctccccttcgttctgggcagaaaccaccagaaattgtgcatcctctcatgtgtccattcatcaagtattgactggacaccttctccgtatggggcactgggctaggcttagcagtgaggaacgtgccctgggcacctgccagaggccatatgactgatgaggatgcaggcccttgtatctgaccccagcactgttgcacagcctctgggcagtgcagagcctctgggcagtctctgtccctcatcaggacggctgatgtggaaatggcacctgccccacttggcactgggcagcctggagtgggttcgacttgcgtggcctccacgtgggccaggcacggtgtgtccagcaggctgagggcggctggcaggtcttcctgcatgggccatgggaggtggtgagctttggcgggcagctcccaatgtctctcgttctgttgcccccaggtcaaggagatactgacagcgctgggcttgctgtcttgcgccaacacgcggaccgggagcctgtcaggtggtcagcgcaagcgcctggccatcgcgctggagctggtgaacaaccctccagtcatgttcttcgatgagcccaccaggtaagtcaggagcatctgagctggtgtccaggggcaggaagaaccccctgtattcagcggttcttccaggtgaccctgacatcctgatgtagcctcagagggggtgagttgagctcacccggcggttcctccttccatctgggaccactgggcagaagagctgacttatgccccctctctcactcactctgtgctcaggcctgcaaggcttgtgttgaccctgggggtatggctttgggggaaacgtcctttcacgatgcatatctcttccatgacaccaagttccccgtggctcagccactctgagggccaaggtcatgggacgacctgggaaacggtgtgtcttcaggtgtgttctggaaacgccctgcagtttagcacagcagaggctcagagatgcctgcaggacaggatcctgcctcggttgctcaccagctctctatacccacgggcgctctgaccccgcctgcaggacaggatcctgcctcagttgctcaccagctctctatacccacgggcgctctgacccctttcctgggtgatgccctttatgtttggggctccctgcggaatcactaccctggagtcctggatctggtgcccccagccgcaggttgagctcgcctgactcctgcatgtgtcctgtccagttgtcccaggcaggatgggtggccaggaaccaggcttctcctgaaatgacttcagccagactttacgttgtctcatttctgccactcactcacctctccaaagtccagcgagatttgacagtagtgtgacagcagccttctgagggggggatggcggggctcacttgtttccttctcttgggcctgcacagtaacagcccacagtgtctataagatacttcaggaaaagagaccacaatgaacccttgaatagcatcttgcaggctgaatgccctgagatgggtgggctccgggggactgcccaacacacactgtcccccgggcctgtcacttcagagttgaggggatgagagcaggagtagatctgaggggctaggaaaggagaagagaggtccccccaggaccctgctggacagtgaaacacctgctggagtaaagcccacctgggctgcagcaaggccaccttctatggggtgatgcccccatcgccagccccatagatgggaggtggggagtgggggtggtgactgcggggcactagaccacctgaggcacagctgcctgcctggacagttgtgaagtccccccccacccaaatgagtggggaacccccacctctttcccacctggacagttgtgaagtaccacccaccacccagatgagtggggaccccccacctctgtcctgcctggacagttgtgaagtaccccccaacccagatgagtggggacccccccacctctgtcccgcctggacagttgcaaagtccccccgcccagatgagtggggacccccccacctctgtcccgcctggacagttgcaaagtccccccgcccagatgagtggggacccccccacctctgtcccgcctggacagttgcgaagtcccccccgcccagatgagtggggacccccccacctctgtcccgcctggacagttgcgaagtcccccccgcccagatgagtggggacccccccacctctgtcccgcctggacagttgcaaagtccccccgcccagatgagtggggacccccccacctctgtcccgcctggacagttgcgaagtcccccccgcccagatgagtggggacccccccacctctgtcccgcctggacagttgcaaagtccccccgcccagatgagtggggacccccccacctctgtcccgcctggatagttgtgaagtccctccctgcccagatgagtggggacccccccccagtcctggactctggcagcaaggctcgctggggtccctccgttcttaccaggaataaaatgcaacatgcaaagccctgctgtgtgccctgccactgagcagcaaaacaaacagcaagagcagagcccggcctgggacggggcagctgcagctgcagcccctgatgccaagccctctgggacaggaactccctggacccccggaacctggggcagtggctagttcctgccgcccgcaggcgtctcacggtgcctcttgacttgcagcggcctggacagcgcctcctgcttccaggtggtctcgctgatgaaagggctcgctcaagggggtcgctccatcatttgcaccatccaccagcccagcgccaaactcttcgagctgttcgaccaggtacgcgggccccgggccctccccgccagattaccactgcactcaggtcagcctgaatgacaccaaaccctgggtacccactgccttctgttagctcgtggggcgtcttcatgacaccaaaccctgggtacccacagccttctgttagctcatggggcatcttcatgacaccaaaccctgggtacccacagccttctgttacctcgtgggatgtcttcatgacatcaaaccctgggtacccatggccttctgttagctcgtggggtgtcttcatttttgagagcgtttaagtgccaggttttgtgagacttgtggaaccacaggcagcgaagggggctggggagtggaagctggtgagcagagtcctctctctgtcctggtggtcggtcatgggatcctgggtgtcaccagcattgtagaacttcatcacctcccctgttaaaatggggggaggggggacacttgttttccagaattaataacaggttacagcatttgcacagtatcatttggtttataaatcttaggttttggccaggcacagtggctgtcccctgtaatcccagcactttgggaggctgaggtgggcagatcacttaagctcaggagttgaagaacaacctgagcaacatggtaaaaccctgtctctacaaaagaaaaaaaaatacaaaaattatcccggtgtggtggcacactcctatagtcccagctactggggaggctgatgtgggaggatcacctgagcccaggaggtggaggctgcactgagccaagatcgtgccactgcactccagcctgggcaacagagcaagaccctgtatcaaaaaaaaaaaaagatgaacaaacaaaaaaacttaggttttgatattagtctaagcaaaaatagtcacaaagggataaaatgtgtatagctccaaaattttttctgagcagggggttagcatgaaaaataaacagcaagcaatatagtcaaatcatcctggccgtgcgatattcttccctggcttatcgtggctttcccttcagatgttaatagggcccttgggggtgatgtaaagctctcaggagaggaagtggctgatcgctgggctgactgattgatcggttgattgattggttgattgattgattgagggctccggttgccttccgaggaaggcagggcttgatccctttttctccttccttttttccagctttacgtcctgagtcaaggacaatgtgtgtaccggggaaaagtctgcaatcttgtgccatatttgagggatttgggtctgaactgcccaacctaccacaacccagcagattttggtaagcggagtcctgagcagctcgggggacagaaaggggattttcctcctctgtgggtctcacttttagctgacgcccccaactcagaaaccacttgactaccacaaatagctcaagtgtcatccagttataaaacgtttaaagaacaaaaaaattaggtttcatttcctctagactctaggtaaaatcatctggccagcctgtctctgcctctctcctgtctccatgtcctaatcacctcctctcctgaggacagcagtcattggattcagggcccaccctaagtccaggatgattcatctcaagatcctaattacctctgcaaagatgctttttcaaataagggtgcatagtgacagtccaggtggacttccctcctccttcgccttccagccatcagtcttaatctgtcgtttttctttaaaatatttgattcatgcaattcccaggactccgtattttctaccacactatttcccaaattgtgttccatgagacattgttcacggacgtgcctctcactcacaaggagtaggctgtgatggagaggagacagggcgagggttgcagggagtgtggtttaaggtgggacgggagccccaggagggttgtggttctggtttcgtgctcgctcacaaggaagagtaacagatcagtaacgggtcactaacggatgctgctgagtggggcaggggaggtgaggtctgaagcctgcatggaggtgagaacctggagggaagggcgggcaggaaggagaggaaacacggtgcgtggggatgcagagaggtcctggagagatgagggcattcccttctggggatttcatttcctcaatgtcgtctgaccagagagcgggaggtgaggggagtgtggcccactgttgagggtgtgggtgaccagaggggcctggaaacattgcctggcagtgctgtaggctcgtttggagcccttgaggatgactttccggtggggccaatgtgtcctggtttgtggcttcatctaggaggtgtggtggcctccgtaccagctgggaggaagcgggtagctggctctgccagagggaagtgcggaaaaggtaagggtgttggggagctttgggccttagcaagaacgttactggagtgggaggcaaggcatcgcacagggaggacacagaggcaggagagggcagaggggttgggagaaagcagatgtaggcagagggaaggaggccagtcaccacgggagtgtggaaggagttgcaggctgcagaggaagtccaggtggagggagaccttaggggagcgagtctgcaggtggagtggggaggtgacgattgggatgcgagaggcaggagcagcgggcagggccggtgcaggagacgctcactgggatctgagaggtgcaggttgagggtcccaggacctccaagtccccagggtgccagccactcatgtggcgatgggcacgtccttctctgccatcttgtagaactgccgtggctctcgtcacaccctgccaaaccacaagctcctcaaggaggagtccctcagggaggagtccttcgttctgctcccttcccagctccaccttggaggctggcccagagcaggcattcagtaagtaccggctggatgagcagtcggtagatgcaggagctcattacttctcagaccactgacagcacagtgtgtgtttgcgtttcccgtctcctgacatgataaagggccttgctggggggtttgagagccgcacgctggttgataaatgattttgacgtcatgccattagcaccgccacgcagcatctatgtaatcgctttaaaacattcccacttgaataacgactttcgcatttgggtggttggggtgtccttcctggagcccgggctgacccccgtctgtgtctcctgcagtcatggaggttgcatccggcgagtacggtgatcagaacagtcggctggtgagagcggttcgggagggcatgtgtgactcagaccacaagagagacctcgggggtgatgccgaggtgaacccttttctttggcaccggccctctgaagaggtaaagcagacaaaacgattaaaggggttgagaaaggtaatgcaaatcccgaagccccctgggggaggctgcacgtggcaccgtgcactgctgcatgagagctctttccgagcaagaaggagccgtggctccggactggctttcacccgctcccctcttgcgtgtgtcctcaggactcctcgtccatggaaggctgccacagcttctctgccagctgcctcacgcagttctgcatcctcttcaagaggaccttcctcagcatcatgagggactcggtaaggctgcccgcatcttctcctgtagctggggaacccgtgggtcattttctcagactcgtcctgacggaatgtgttcgttcattctcacattgctataaagaaattcatgaggccaggcatggtgactcatgtctgtaaccccagcactttgggaggccaaggcaggcagatcatttgaggccaggagttcagaccagcctggccaacgtggggaaaccccatctctgctaaaaatacaaaaattagccaggcctggtagtgcatgcctgtaatcccagctactcaggaggctggggcaggagaactgcttgaacccaggggggcggagattgcagtgagccgagattgcaccactgcactccagcctgggtgacagagagagactcccatctgaaaaagaaagaaaggaaagaaaggaagggaaagggaaagggagaaaggaagggaagggaaggaaaggaaaggaaaaaagaaagaaagaaagaaatgcctgagcctggggaatttataaagaaaagaggtttaattggctcattgttctgcaggctgtgtaagaagcatggccggggagccctcaggaaactttcaatcatggtggaaggcaaagtgggatggagcgctacacacttttaaacattcagatctcacaataactcacccattgtcatgagcacagacccaaaggagaagtccacccccatgatccaatcaggccccatctccaacattggggattacaatttgacatgagatttgggcggggacacagacccaaaccatatcactaaactttcaaattacttttcttctatttgcaatagtcagcgttcactgtaatgctgcagtaacaaacactcccataatgtacgtgtctccctccatcaatatttgtgtcctgcttgtgttaggggtggcaacggtgggttgtatcatggctctgtcccataagtcttctcatcccgggacagctcctatctggacatgcctttcttcaccatgtcaaaggaaaagtgcaagagagaaaccaaatgacagcccttaaaacttccagttggaagtggcaaatcatcacttgcactcacatgccattggcctaaacaagtcacatggccgagcctgaaaccagggctgtaggcgagtccatttctccttcaggaaagcactgtgaatcatgaggattgggacggggggttggacaattccttatagggaaggaggtggtgaatacgcgggaaccataattctaccagagaagttgacaatctggccacctacttaggagcggctgaatgcctggcatggcttctgggacctaatttgaaagacagaggggctcaccgccgtccacagcagagttcttagagcctctgatatagccacttttccctcaccattgtttttacctttcctctcttctgagggtagacttcctttgttctccatttttaaatcttttacaaaggatagtaattatgttggttttaacacaacaaaagcctgacatgtgtgcatatatgtgtgtgagcaggcgtgtatgtgtgtgtgtgagtgtgtgtgtgtatgtgagtcgctttagggtttggcttgtttctctggaggagaagacaggataaagtctaagacgtgctgtcacagagttcagggtcccatgcttccaaaggccgcatccgggttgttctctgagccgaggacggctttgcgaacgcactgggtaagatgcgggtctgtccccaggtcctgacacacctgcgcatcacctcgcacattgggatcggcctcctcattggcctgctgtacttggggatcgggaacgaagccaagaaggtcttgagcaactccggcttcctcttcttctccatgctgttcctcatgttcgcggccctcatgcctactgttctgacatgtgagtgacagaccgctgaccccttcttccttattttcaattcctacccaagcatgggggcctgaagtcacgccttgaccaacagatgagttttctaaacacaatgtttttgtttttttaaaatatcatcttctttgttgacagatgcaagttgtattgtatttgctgttagataagaaaatacaatacttaagccaaaggaatgaatcccaaatggaagacttttaagcatgatggaaggctgatgggagggagatttctcaaagattcactaattaggagccccccaactctactacttaagcattacctagttcaattgttaagatagctctgcacagcccacttcgggagcagataagctctcttagatggatatccacacaattccagtttgttcacaaggagactgcccttggtcactttggctgacagtgaacacagcggctgcttctccagaactttagcataaatagctcctccctaggtacctcctccccaagcttcccctgatttccaagagcagcttgcagccttgctcacaggaaggcaccacgttgatgcagagtttcagaagaggcagactcaggaagagtaaggccaggcatgaatccttgccttcatcactaagatgatgctttgtattcacagacatgctccccatcctgattctccactcaatgactcttcaggttatgcaaacgggtggcgtttttcaggctagcaaaacacatcctctgtttgttcaatctctcagtgccctaggccagagctgggttaccagccgctcagctcaagatcgcctgttgggatgttaaacgggctcgctgcacatggtcactgacccttcttttttgcttttctatctcctagttcccctggagatgggagtctttcttcgggaacacctgaactactggtacagcctgaaggcctactacctggccaagaccatggcagacgtgccctttcaggtgtgttagccaggggctggaatttgaaacgggggcaagagttctcctgtacaccctttatatcgagtaagaggacctgccagggatgcagggtgacatggcccgacttcgggagctctggtgggagctgcggggaagggcctgacttcgggagctgtggcgggagctgtggggagtggggaaggacccgactttgggagctctggcgggagctgcggggaagggctggctgcccaggagctttgctgttggcctgctgtggtgggaagcggctgagcccgcggctgacgggtccttgtttccagatcatgttcccagtggcctactgcagcatcgtgtactggatgacgtcgcagccgtccgacgccgtgcgctttgtgctgtttgccgcgctgggcaccatgacctccctggtggcacagtccctgggcctgctgatcggagccgcctccacgtccctgcaggtgccagcccaggaggcgctaagtgagggcatgacggctgggcttccctgagctaccttggcctgagctagggggctctgccaccccttcccctacttctgccctgaccctcctagatggggtcgttcccacgggaagggcccgcattgtcgagggtcaggatcagctggcttccacagtgcgcacagcgggcagcctcacgtgtgctgactgcgtgctgggcgctcttcccagcgcttcccagatctgagctcctgtagccccaagcacagccacgcttaggtgctgtgctggccccattttacataggggagcactgaggcccagagaggcaaagtgatttgtcagggggtcacacagctgactcgggagccaagctcccaacacctatgcatcactgcctctgtggggttccctcggcctctccatgggccccttcctcctcccatcgcccaccctgccccccgacctgccgcccacatgcacctgcaggttctctacctctgtggctttaggacgctcggcctcagcctgtccttctggacaaaagcagtgttcctgggtggattgggaacacccgagggccccagggtcccatgctgggtgcagtgtattcctgagtcacctccagtccaccataagcaagctccctggcctccagggcccaggtgccctcaccttagatgaggactgccatggagcccatctcacaaggctgccatgggaccaaagatgacactgcaggaaggtgccaggcccatgccaggtgctgcaacccgtgtgccccaaggccagccccagtgcacctgctcagccacccccaggacccctgcctagggcactcaggctccgcaggggtcactaatcagaccagggctgggatgcccctgtctgcacggttgcacacggcacacatgcacacacacactacacacagaccacactacacactacacaccacacactacacacataccacactacacacacaccacactacacaccacacacactacacaccacacacggtgcacaccacacactacacaccacactacacactacacaccacacactgcatacacaccacactacacactacacaccacacacacaccacactacacaccatacactatacacataccacactacacagtacacaccacacacactacacaccacacagtacacactgcacaccacactacacactacccaccacacactacacacacaccacactacacactacacaccacacatactacacaccacacactaaacacatacgacactacacactacacaccacacactacacacacaccacactacacagtacacaccacacactacacacacaccacactacacactacacaccacacacactacacacataccacactacacacacaccacacacactacacaccacacacggtacacaccacacactacacacaccacacactacacactacacaccacacacggtacacaccacacactacacacacaccacactacacactacacaccacacactgcatacacacactacacactacacaccacacacacaccacactacacaccatacactacacacataccacactacacagtacacaccacacacactacacaccacacagtacacactacacaccacactacacactacccaccacacactacacacacaccacactacacactacacaccacacatactacacaccacgcactacacacataccacactacacactacacaccacacactacacacacaccacactacacagtacacaccacaccacacactacacacacatcacactacacactacccaccacacatactacacaccacgcactacacacataccacactacacactacacaccacacactacacacataccacactacacagtacacaccacactacacactacacaccacacacacaccacacacactacacaccacacactacacacgcaccacactacacactacacaccacacactacacatacaccacactacacactacacacaaatactacatacacacaccacacagtacataccacataccacaccctacacacaaacacacactacacactacatgctatgcacacacaccactcactgcgcacacagactacacactagaaacatcacacactacacaccacaccacacaccacacactccacaccacacaccacacaccgcagacaccacacacaccacacagcagacaccgcccacaccacacacacactccacacacacactccacacacacactccacacaccctcctacccccgacacactcacagtgcccctgttggacctgtgctcactgtgaaccctgagtcgcggcggttgcttcggtctctgggctgccctcccggaggtgctgacaggcaggcgtccatcccgcctgtgaaggctgcagtccttccactgtgccccgaccgaaggggtgcccgccacacacctgccacaggccaggcacttagcccccccggggacagctgtggaggagcagacggcagtctgttgaggagggtgtgtccccacctctctggcctggggacatccactgggtcccagctcatcctgggctgcaggaggctctggggctgccacgtcacagcagggcagccggggggtcctcagagatggtgaccccacacctcgggaacgctgcaccttctgccacattaagcatcatcattaccctgcccagaaggtgccctggccctgcccgggggaagctggcgtgggcgagcctcctctgcaggaggccaggctgcaggttctgctacatctgtcctgtgtgcccccaactccaggtggccactttcgtgggcccagtgacagccatcccggtgctcctgttctcggggttcttcgtcagcttcgacaccatccccacgtacctacagtggatgtcctacatctcctatgtcaggtagcgggcgtggggcacgcatggcgtggggaccgagggtgacgggggaagaaccgtctccaacagcgtgaggggctcacaaaagccactctgggctgctggccaagagcagattacacatctgaggatccaggccttccatcttcctgctagttccacctcctcctaccctcaccaacacacacacactaaacaaggaggccacacaaaccagcgcttcacacccggagagccatggcaggaccaagtgttctggacgttgccgagagctgccttcggtggaagcgcttccatcttttaggaacgttcttcctccccgaagtgccgagtgctcctaacaagtgctgattgtaaaacctttataagaaatctggtgggagtcaggcgtggtggctcatgtctgtaatcccagcactttgggaggctgaggcaggcagatcacttgaggtcaggagtttgagaccagcctggccaacatggcgaaaccccgtctccactaaaaacacaaaacaattaggtgggcttggtggcgcgcgactgtaattctagctactccggaggctgaggcgggagggcgggaagatcccttgaacctgggaggcagaggttgcagtgagctgagatcgcgccactgcactccagcctaggtgacagagtgagactccgtctcaataaaaaaaaaaaaaaaaaaaaaaaaaaaaaaaaaaaaaaaaaaaaggaaagaaatctggtgggaaacaagtcatttttaaacatctttttaaacatcctaatatcttggaacaagaatgcccagtgcctcaggtccttagctacaacgtttcgtgccctctgtggagtgcggtgttggcacgctggccccaccaggggcagcgcccatcttccgagctgcagaagttccatgtgacactaagatccaaagttgggaacaagctcttcttctctagaatgtcagttcagacttaggtatattgttcaagaaaacaaagcacttgtacagagtttcgacaatctgcgtgtgctccaacactatgaaatcagaaaccgacgtctttcttctcaaaatgagtgcttttgttctgacagggcaggactggagcagagggagagagggggcaggaatgtttcatataaatgctctcaagtccttgcaagttggctggcccacgattccctccaaccgttagaaagcatgtaacctcggaagtgaacacaagacttctcagtgcatttcaccagtgaatatgtaccgctcattcaacttgtttttttgctgggggccctggaggaaacaaaattggaagaaaaacatagtggagctgttgcacgtgtttgtcttaagaaggtggtgggcggtgaggaagtattctggggaaggcggccctttgggaagggaggatagccaagctgggaatcgcagggagggtgaacgacattgaccttcagccaacggcgtggctggctgggagaacgtcctccctcatgcctggcctttcctcctaggtatgggttcgaaggggtcatcctctccatctatggcttagaccgggaagatctgcactgtgacatcgacgagacgtgccacttccagaagtcggaggccatcctgcgggagctggacgtggaaaatgccaagctgtacctggacttcatcgtactcgggattttcttcatctccctccgcctcattgcctattttgtcctcaggtacaaaatccgggcagagaggtaaaacacctgaatgccaggaaacaggaagattagacactgtggccgagggcacgtctagaatcgaggaggcaagcctgtgcccgaccgacgacacagagactcttctgatccaacccctagaaccgcgttgggtttgtgggtgtctcgtgctcagccactctgcccagctgggttggatcttctctccattcccctttctagctttaactaggaagatgtaggcagattggtggtttttttttttttaacatacagaattttaaataccacaactggggcagaatttaaagctgcaacacagctggtgatgagaggcttcctcagtccagtcgctccttagcaccaggcaccgtgggtcctggatggggaactgcaagcagcctctcagctgatggctgcacagtcagatgtctggtggcagagagtccgagcatggagcgattccattttatgactgttgtttttcacattttcatctttctaaggtgtgtctcttttccaatgagaagtcatttttgcaagccaaaagtcgatcaatcgcattcattttaagaaattatacctttttagtacttgctgaagaatgattcagggtaaatcacatactttgtttagagaggcgaggggtttaaccgagtcacccagctggtctcatacatagacagcacttgtgaaggattgaatgcaggttccaggtggagggaagacgtggacaccatctccactgagccatgcagacatttttaaaagctatacaaaaaattgtgagaagacattggccaactctttcaaagtctttctttttccacgtgcttcttattttaagcgaaatatattgtttgtttcttcctaactttctgactacctttaattttgcctaggttgatttaaacaaacaaacaaacagcttccctttcctcctgtatcacctcagctgcctccactgaacctggaagaatggggcttagggaaattcaggcacgacctttgagggttggctcagcaggagtggccagcagtgaaagatgggctaactgtgcaagaggggaggaggccaacgagatggcatcagaatccaagggcttaggacgaagtcagtagacttcagcatgtggaggcatttgaaacttgatcaaacaacgcacttcgagtggtgggagatttcatctctgggttttgcgacctcacagctgcatcaccgcctcagtgttaggcctgtgtaaactttgcacgttggaaaccgcttctttcctatgactgaatcacataagtcaaatcccgctagggcagaaacaggtgcctatctggaggtcaagtggtctttgaattcacaacaaggctgcctgtgagtttgtcagctctcagaagcagtttgactacatgcagagaaggtgattctggccaaagaagtccacctttaggaaaatgccattgtttactccctctagaatatcattctcctagaatcagggcttccgatggaaaggctgtgtttttgcgggaaaatcagtgaacctttctaagctacatttttcctcatctgtaaatagttacagtacatcatgcccaaggccatgccagctcaaaggtggtgggattccttggcgatgtccctgaagctcttatttcccacttcgaaagaacgaaaagggtctgaattttatttacacatggatttagtttgctaattcttagagattccttttttactgctagatcttttttagtaaacacaattgagatagatattaaagtgtaattttaagtgtgcttgttctatacaaatatggcattgccttccagattaagtttttaaccagagtcaaacttagcctttataaaaagtcctcatttaatttcaaaatagatcttcttgtaagacattgcacatagggaagacctacctaggaatagcctggtgaaatgcagaattggaaaaaggcaaaagtccttgctcatgactcagaactacatcgagtgaggtcagtgttgaaaacgcccattccctccaggtgagccttccccattgtggattagtgttgtggcttcatggccctaataggggtgtgtctgccaggaactgcactgcatggggcccacagccctgcctcagaagcagctttggtctcgtttgctgagaccgcttgctgtgcctcatcaatttcaggaggaaacagtgagatgcctctagattttaaatctggtttcggagagcacctaagccctctgatggaatgactctcgtaggaacttgatgggggtaattctaagggggaagagcttgggaaccatgagggctgttaggctgcaagaagggaatggatatgtgagaccatgtgggtttattttttgaagggtgaactggagtaggtgaggattctgcagttgacgccccaggatggctttgctcagccctcccccgtagactggaggaaagcctaccgccaagggaggagaggatgcatctgtcctaggtgcagccggcctccctcttccaggttcagcaagggtccctggctgggcattttcctcgtaacctttggcagcattggctcaaatgccattgtttagattcccagatatttccccactgctttttgtgttaaggtagtttggtaaaatgccttattccaatggcctaagataatatcaagcaactcactggtttacttttctaaccagctgtggttaagacacacacggcaatgtgctatctttcacatgttggacgttaaacccagaccaactccccaaatctaatttgtttcagtaatttctgaatgcattgaccaagatattcctttcatctctggttgagtttcttccattagaaggaaggattaaaccttggataaaagatttgcagatgccccagtggttagtagaggtgaaaatggaggtttcagggaaactgctggggccttttgcctttgtcctcatccaaagcattttgtgcctctctttcttctcctctggctgaatatccactggagattgaattctccgaaactccctgtgtgggtgaagtgggaagctgtgcccaggaaggggagtaactgtgcaaagttttatgcagtcagtgccagaattggattacatcacctgggggaggcgccttcaggaccaggaaatggtacatggagctttgaggtgaaaactcatcttagaaacccacaaaaagtcattcccccagcctgacatcagggacagaccacacccatggggcagaaaccgggcttggttgttgcagtgggaagagaaggcacgactctggtgcaccgagcacctttcctcgtggctgtttccaggcactgggctggatgtcctcagaaccccctgtcccctgcccactcctcaaacccttactgacccacccctctcgcctggtgctgtcccaggccctgggggtgagggggaggggactccaacgtgggcttgccctccagtgtggtgggagggaaccgcgtggccacttggcttagccgtgctcatggtgcagacgtggaacgcggaggcagggagaggctccgtgacgtccccagggccccagaacgaggaaggagcggagttgggattccagcccagttggacgctgaagtccctgttttgtttactgcctcctgttcatggcgtatgaatgtatctgagatgctttgtaaggcataaagtgcaatactagcttagtggctgttcgttcagtgattccttctgttaccaaacaggtggctgagatgagagggcaacccaagcctaacgcccttcagtggccttgcatcagagtactcgtgacaggtacctctccgtggagaggggctgtcctctgcccttgcctgctcctcctattgcaacagtcctgtggactagctcaggctctacaggggctggtgtgtgtgtgtgcgtgtatggtgtatatgtgtctacctacacacaagcacatgtgcacacatgcacacacatgcatgcaagcacacgcacacacacacatgcacacacactcacatggacacacacatacacacacatacacacacatacatgcacacacatgcacatggacacacatacatgcacacacatacatgcaggtgtgcagacttggctccaggcgtgtgtttgatagtattattctatgatatttccctcatctccatagaataccagcttctgaatcctcaatcagcctttactgcaagaagaaaagaaaaacctctctcattccaggtctgtggtgcagatgggaagagtatagtcaaaacccattaaggccttagtcaaatgccagccgaattagaacgcaatgaacgttagacaaaacaacccaactggccaggcgggggaggcgcagagcgtataaatataaagttagatacttataaagaataaagactctaataaaatattttatataaaactttttacctgtgttcagcgtcagatgcttcaagtgattggctttgcattctcctaagtcgatggattcttaggctgtgtctagaatgcgtttgttgtccctctgggaagagcactgatttgtcgctcatgttctggtccaagacgtggctgtagatgagccctttctcgatgatgttcatgtattatgttgaattgtcttaaagttttgtgttttctgttctcccagaatcctcacccatgtcctcctgcctcgtgatgttggccatgacctcgaaatgtgcctggaggaggctcgaggcagggctagcaggagggcactgggccacaccttccctttggtcctctccacccttgcaggggctccctcaaccggggctctggggcggtagctctggcagggcgacgtcgcttcttccttactctgctttgctggaaacccatctcccaggctgagctctgtagaggcagctgctagtggggaaggcagcccctctagaggttttggtcccaaagttgaggtgagcagggcctagcagttgctcagtgttatgtgctgcattagcccatggttccccgagctccggccaggcagtgaccctcagagtgaagactttccgggacaccagtggcttagaactgggctttcaaatccagcttccctcccacctctgggacacagagcagagagccgggctgggtgaggtcacagaatcggcccgcagtggcccctgcactcctcctatggcgggcaggcacaatcgaaggctgccccaggcgtgcacacaagctcgcgatgcacagttttcttcccccctcggtaaccccagcctttctggacggcccggccgccctgggtcccagtaatgttaaagtcacggtcctttccaagccactgtacttgggctgtcccgtcagggaggttcctccaagataattgccccctgcaaagacaggggcttctgatgtccacttgtggggctgacctttttggggaacctccctgggaccagaagcagggaagaaataagagaccctgcacccccatggcacagtctaattttcacttacaagctcaattcaggctgtccttaaaatccacgtgtcctgggcaggaaggaaatgtggggacaggcacacacgcacatccttctgctatgctgacctaaagttcctaatagctatcctacatcctgcccgtttcttttttccatatttgaggaaacagaagggtttagccttagcctagtttttttatgttatctctgaacaggccaacctggaatcacccctcacacagacacgtgtggcctgccccagtgtgcctgaggcccacccaggaaccctgctttgcctggggtttatgtgaatgacacacatgtgagcagaggctggggttaggaccctgaggcttccctgttctcagaaatactctcctggcatcaaaaggagaaaacggtccatgccactggctaccacattccagcctggcaagggtttactgtttatagaggcaccgtttgggggcttttccatgtagaatggccgttgtaaagctgaagagaaaggaacagaagcacaaaagcaccttgattcttcgcaaacacaggcaggggctgccggctggacgagggcgctgcattttgagggcgtgctggacccgctggcagagcccgccctgagggttttctctgcagctgtgggctaagcttgcccaagcccctccccttttccagaaagccacccccatggccacttgcctttcaggtccaggttgaggacacagccacgggcatatatgtatttgtttcactggggttcatggttctggggacagtcttctagcccccgagatcttgggaaaggcatgagctcaagccacataaccaaaaagtagcaaaactcaaaattattactttactttcagctgttttctctcaatagcgcgccaccatcgtctgtgtgtctgcactgaacaaacatacgagagaatctggctgatcactttgagtgcctttggcctaaactttgcacatgactttaaacgtggccctgatactgcacacagtaagaaatgttttttattttatggtccctgaggttacgagatcagatctctggaaatgtgtaagccacctgctgtcacctctgacccatgtggtccattaccatgagggccggtgagtggggcagagatgctgaggcctggctggtgagcccccgagcagtgaggcaggaccctccctggtgacctgtgtgggggccagtcctctagtcccccagacaaatctccctttaaggaggcttctgaagctctgagtgccggcgctcagaattaatttgactcttcactgctcaccgcacctgcctatgagcctctagaaaacagcttgcccaatgagagtgctgcagctgaggcagcagcagacatgtccgtttctggggaagttactcaaacaatcgtgcctcttagggggccctaatgtgccccttctggcaggttgaaatgcatctggccttgaaggggaaggttaggaaattatgaagtacgtgggtttagggttgacaaccccatatccgtggactcctggagatccctgaacgccgtctaatctgaatggtaccacaatttggtttgtctgaaaatatagtagtaaccacggcagtgatttcatttttacacgtttgcatttttacatgtctgtcattatgcatcttggggtctcttttccatgacctaccagcttcccaagcttaataatcagtatctcactattatgtcattggccaactgaaaacagtagcaaaacatcctatcatccaaattgctaataaaatagaacaccacacccacacgctggcttcccatttttatagtcttatcctcccacctggagggtgtgaatggggatcagtttttcaatagaacatgtatgtttggtaagttaatatgtgtagctgacccctttgcctttgtttttatatatttatgtttttctattgtagacatattgatgcaatacctgttcatagttgaatctgttacaaattgttaccttttatttgatgaagaactatttaaagattttccttttttatttcttctaaagcaaaagtcaatgcaagtaactctaatcagcgtgcaaaggcgtgcatatatatctgctatgtaattatataatgtttttataatgctgtgtggataacttttcactgatttagttacttgactgtaggaaacactgttgctttgcacgctgtgagaggtttgcactgttacagatgaaggcaacatatttacatatgtacatgtatatacatatatatatattcaaaaataacatcggctctttggggtgtctgtttccttggttgtctcacgccactggaacattgaacccagacagaccctaggatgtgaggttcctgactgcaccttacggaccacagagccacgtgtctatttctgtagacctatctccttagatttgtacatgcattttttgcggacttgaactttgttttctgaaattagatgccatttatgatgatgtgatgtcaatcaaataaagcatcattattttcagatttctgcttctctttccttttgctttcaacagccccagctctcagacctgctgggggagtcgcgtctggtagagcatctcgtattttctccctacctgcccttgctctcaatggagcacttctctcttcagtgtcaggatggattccagtgaggaagacaaataagagtgatggtaaggaagcctgtagctccagactccatggagcaccatgtggtggcacagtaccctacctttccatgcgcaatctcatcaaaccgtcgtcatcagagctggagagccgcaactggccccatttttcaggttaaaaacaccgaggctcagggatattacacaacttgccaaagccacagagctggtcggtggtgcacgcagaagtgagaccctggccatccaggcagggctcctggccactccatggctctcccttcctccgggagaggcatttaggatttgagaccacacaggaggagaatccacgttgtgcaggaagtggtgtggcaggtctgaccctcatgaccagtggaaacttctcctcccagacacttggctgaggggtgagatgatgtgccaacatctccagggatcggcctggaggtccttgtgctgtcaagaccccttgtgagtcagcactggggcctgggtccagatgtcatctgggatcatcacctgggacatggccctactgggccctacttgtaggcgaggaggaaggtgtgcatgtgtgggtaggaacgagacagtgcaaaaagccgctgcctggtgacctggcatgcagactcggccctcccacttgcacggtgatccactgaagacaacagctgcctctgtactcacgctcccccacactcccctccttcctgccctggtttctccatccctagatgccatcccatgccccaaaccatccgccaagcacaataacctcgcccccacccaccccatgaggtcactcgagttgacaaccagataacagtttttgttttgttttgttttgttttgttttgtttgtttttgagacggggtctcgctctgttgcccaggctggagtgcaatgacgttatctcggctcaccacaacctccgcctcccgggttcaagagattcttctgcctcagctgcctgagtagctgggactacaggcgcgtgccaccattctcagctaacttttgtatttttagtagagacagggtttcattatattggccaggctggtctcgaactcctgacctcttgatccgcccacctcagcctctcaaagtgcagggattacaggcgtgagccaccgcgcccaatagcaatttgatgacccatcccctccactgctgggaaaaggctgggcaccgcccacactccatgcagctctctttccctggctcggaatcgctgcaggcgccacagaccagacgcgcactgttccccactcctgcttatcggccgcgcggcatccccttgtcgcagcactccagcatccatgcagccgcgcggcaccccgtcttcggagcactccagaatccatgcagagcgcagcaccccacatccagagcgctccagaatccatgaagcacgcggcaccccctcgtcagagtgctccagaatccatgaagtgcgcagcaccccttaatcggagcgctctagaacccgtgcagcgagcagcaccccacacccggagcgctccagaatccatgaagccagcagcaccccacacccggagtgctccagaatccacgcagcacgtggcatctcctcgtcatagcgttctagaatccatgcagcgagcagtaccccacaccgggagcgctccagaatccacgcagcgtctggcacatctttatcagagcgctccagagtccatgcagccacagtcctccaacggaccctgagattgtttctgcaaaaggccatgccttcataaatctgaaaatttggaaaacatccttctacttatatccttacaacccaccattcaagctgtagaagcctttctggaaccccaagcagaaggatatccaaaatgtaaaaacggtggggcctgcaatcccacggagcaccccccactctcacggtgcccaggtcgtcccactcagcacggacattctgcctccagccctggggcctccaggttatacccaaaagaggtgactcttggggacgtaaggtgcgtggggtgccatgaaccctcccaaggctgcagcctcttgggcaaggagtccacagtgctgttgccagccaaattggctgcacccctgcacgagggggctgatcttccccacaccaccactgtggctggcatcgcagtaggtaccacttgttaacaacctcgttctacagagagatggtgaagccagacgcaggtaaacctgtggcagggcactcttcctgaagaaccaacagatcccctcaggcccgccccgctgttttatttcccttctctgccctttccccggtgcaagcagctgttggtctgtgcttcctgctgctctgctctgcagatactaacgaagccacaaccagggggccgggtggtcacagcagggaccacagctgggcaacctataatctctgtgacgctgggagctctgggacctcatttttcctaatgtccccatctgtaaatagccaggttgccatgttgagagcaggtgtcagagggaaatgggatctcgccacactgcaggactgagacaattcctctggttggtgagggctgggcctaggatgggaggctcagagcagtgaatgaatggatgtggtgttggatgcttcctccaggaggcctgcccgcctgcccctgtggaggacagaggccagggagacaggtcagtgggatgggggagcagagggagtcggttgcaccccacaaaacccaagagggaaaggctgcagtgttcaggccaacagggacaaagacagctgcacagcgagaagcagcaaatgattcctgtgcctgagtgtggtcttggaatggcagagagaacccttgagcctgggagccacctggaagggaacaaggccgtctggcagccacctggcaggacccatggcattgaagatcagatgtgccagccacaccttggtgctcggtatgcccttggaaataaactctcagttctcagggcaaaaaggctttgtctaaatgggcaaatcaacagaggtatcagcacatgtacagatgtgtgcttaatgaagatattattcccatgccatagaattcacttttttaaagtgttcgtctcagggggttttagtattgttttagtaaagtgtacgatttggtggtttttagtatctaatattgcacagaattgtgcagccagtatcatatgccactccagaacatttccatcaccccaaaaggaaaccccttccccatgaacagccactccccatccctccccctacccagcaaccactgaaacactgtctgtctctgtgggtttccctattctgcacatttcatataaatggaatcacacaacacatggctttttgtgatcggcttctttcacttagcataaaacacacttcagttttgaaaacaaaataaaacctaaggaagaaagggagcatgaactctaaatgcagtagaaaactatggccgaccaaggggatgcggctctgacctcacaggggaatgagctttctcagcctgcaccttgcttctgcagctgtcggcaaccctctgatacagccattataattgtcccattttgctgataggaactttgaagccccagggctctctaactctttccaatacatgacagtgcctctcgagcccccaagaaggaggactgaggggagaatttccagcctccacagctgtgtcacagcccagggccctgcagggcctcagagcaaaaacctagtgagcagggaggcttcttggccactggagatgcacctaccactcagctgtccctcagagacgacctgctgcagggacccaggtcaccgacagccccgcatccagcatgacatccacgccaggcccacttccctgaggctgctcccaaccagggcattcccaccagacacagggtccctcgaggggcactctgctttggggactccccatcagcctgcgggaggctcttcctccccagtccttcccccactcatttcggaggcaagaactccccagtacgtctgctacttatggaagcccacatgggtgtctcagcttgaagccaaaattctcgccattggaaattatgaatccttggaatacagtgatgaatacaagtgaatatccaatgtattatggaacaatgtagagctttctagcagactccagaggaactgtggaaaatgagaagtgccacagccgcacccttcaccaccaactcaagaggagggggaaggcatgggcatggcacggaaaaccatcatggggtgtaacggctgcagcgtggggagaagcctagcgtttctctcccctttccaacagcagcacacgccagcagcgagggagcccagccatgttctggcttcttctggcaatcaaagtgttcattctggaaggctctggaaacacggaccatttccaagttagtgatgaaggtatttgacataaaaatggttcctgggtcctatgggtcacaattcattatttgaattcgccgtgagccgctgatggatgtcggtttcagatgtgcccagaccaggaggtgggaaggcccagcaggtggcgttgaggccacctgggctctggacagctgttgtcaactgatgcccagtgctggaaattaaatatgcacgaggccttatgaaaatataagaaataaaaggagagtaatgttcagtacattcctattcagtgcaccatgctccccatgtccacaccagaggacgggatgaaggagtccggggcttgaatccccctggatgggccacccgaggaacacaggcagccctggcactgacatgcttgaaatgaacgactcagctaacgctgcaaaccaaacaaatgcagtgtcttcttgatttacatgacataccctcctggagaattcaggtatgttcaagccatttgaaacaacaaacaacaaccaaaacaactgtgttaaaatgtaacacagaagtagtctctgggtttcgatcgccgtgaataggtttgcagccaccatgtgtgtccaacaggacgccaggacgtctatcgggtggaggcagtggtctgttcaggacacctggggacaccacagggtcctgccatgtctggcctgtgtccactcaatgccccctttcatacgattcataaacgtgcccacagattcccgaacatccccgtggcagcagcctccactgggaaccctcggcttagatcatgtgtcctgggtcccagatcctcctcaccaacaggaagcccagggtcattctggggctgcgtatcttaatttgtatctagaaggggcagggcacagctgtgattggtggcgagccgcagtgactccagcagtcagtagagggcgctgttcggtcgctttgtggtttggaccaggtttccgttctgccgtcgggctggggggtgggtgggctgcttttgggtcctgctcccccattggtgtctgtgatctcttatgagaatgtcacagcccccaggtgggtgctgtcaggggcgttgcgctctttctcatagcataaaccctacccggggttctgagagccccccgaccatgcctggggctcgcgaggaaggcagggagcttccaaggtccccatagcaaccgaagtcgaagcgagggagaggcagagacggtcggaggcaggacacgggagacagagaaagacgggggtccagtccagctcattccaggaccccagccctcctcagcccctttcctttcctcactggggtctgccctgcacagctggattatggggagtctctgtcctgccggttgttgccagcagatctctccatctgatgctatttcatttgatggaagcaacctcgatccagcccacacgggcagcaggagtcaatggtgaagcttctagaatgtgcacgaagcattgtcctgtctgaggaaggcacaggctcaggctggagacagggagcagctctgtggtgggtgaaggaggagtcccacctggctcaagttctgggggagccctccctctcagggcacagtgggaagtctgggccggggggaccacagtgcaggaggtgtctgcagtgactgcagaaggcaatgccaggaacggcggggtggggcaagtcaagaaattctttggaaatgtaggtgggcggtgcccatgaatgaggcaaggaggcagcagagccctgtcccggggtacagggcaccaggtggggtaggaggaaaacggagctggtcatccagctggtggcagggtggcctgaggctgaggccagggcctggggccaacctttccatccctccagccctcaaaggctgggcatggtctgtgagggagagggatgcagagccccgcctcggaggatgtcccggccagagcagctctcagtagcagagctccagagcagggaggccacacttggcgtgtgctctgaggcccgggatagccctggaagtttccctcccagggctggcagctgatgcttcggggcattggatgggacacccagggcttgagatttagagaccaggacatcctgacagtgtcccctctcagtaggggcttttggacaagctacttcaagaaagtctctttccatatctgtaagacaagggcaatactacctcccttctagggatgttatgagctctagggaccaggccccgagtgcaagctcaaaaacaaaagctgctattttaaaggagcagttgtctcttttcaaaagggaacagatagctcagagcaagaaccccaccgctgtgaccgcactgcagtggaattgtggatccggccctaagagagccccggcagtgggagcagcacaggaggcccaggcaggcagcgctcacaggaggcccaagcaggcagcgctcacaggaggcccaggcaggcagcgctcacaggaggcccagccaggcagcgctcactggccttcgtacatctaaaaccgtcttggtgggagcggagagctgccgtgtcccaagacagtgcgatggggagagaaccacactcaggtccagaagtggataaggcttcatgaggacgtgagatggaatccccactgccaccagctcattcatttcctatagctgcatccatttttttaaaaaaagagaaaagaaggccacccaatgtgtcacagatgtttaaacttaattagcaaacaaatacaaaaaagtgcctgtttgttcataatgtttactgtacaaagaaacaaaacccaggaatagtacaagtattgaacagtagcgagagtggttgtgaaataaaggaccactttggaagacagttttattggcttgctgtcttcaccaagaaagacttgtgatttttgaaaacttctacctgaaatgtattttttctgctttcccgaggaagcggcacttacagtgttcctaggctttcctgtgacgtgggtgccagtctggattcaaaatatccttgcatgcactgcagctccttagggagtcttttcctgcccttgaggcctgggcagactctcccctgacaccctcccgccctctcccacgacgcagcagaaataaagcacaacctcagaaagtctcaggcacgaagaactgtcctcgggtggagcatgggacctttattcgttaagacatcaggctccagatatgaactttcagcagaagcgcttgccgggagcaaagggacagaaaagctgagatgaacagtgcctggcagcaatcacagccgggcaagggtgctccgagcctcgcatcccccggccgggggcagctggaggtgcctcagaaggtgcattctgcaaacagagcaaaggcttgtgtgagcagtctctctccacccacgctgcccagcttcccaaggtcagggcaggctccaaggccagcacctagtgctgcctcctccccagagtcaccggggagtgttgagtccccaccacatgggggaatagccaagattcccacctcgggttgctaagcaagatagtgggacccagggatcaggcagataacaagcgagatgggccttggcagggccatggctggcactcagaggagagtgtagttccagtggagctgaaggaacaggaccggcagtggacagtagccagacccctctctctcctggccttctctggacccccacccccacccctaccctggacttgctggggagggtgaagggaggccctgggcaggggcccatcattgatcagggagccggggccagcaggactcagcctcccgcatttcaccctaggacaaagggcaagagaggcccctctggatgctggttccaggaaggtacctcacgcaggtgcggccttcgtgggggctgagctggcacttggacatggcagatggcttatagccaatcgccccacccacgatgtggggcagctaagcctggtggagccagggtggcaaacccgtgtgcagggccatctgttacccgcacagcacgcaggctctccgcccctggggagggaacccccagggtggttgccctgcacctgccctccaccacggcagagagagggagaggagatgacccttgtggggggcagagtgggggaggtggggtgtggcaccgaggcctgacgtctagggctgggaccgcctgccgtctgtgtaggggatgccacaaatgacaagactctggggggccgatttgcaaaaacagcccaaaagtcggcccggctttccacacctatgcgtttccacttctctcaagaatagttactaaatcagttccctctatgcgatgccatcattttgaacacctttttgaaacaattgcttttatgttttacataaaggggacagaagaggacagcccctggccatggctgccctaagtgtgaagcctctgctctgaggccttggaacaggtgtgtgtgtgtggcttcctggggtccttgtgcctccatctccagcccagaaaggacagggaggccctgagaccccctgccttatggggctgggcccagaccacgatgccactggggccttacctgcttcctgcaggggcttgaaacaccaaggcactccagggatcctggagtcaaagcagcagccccggttgttgcactccttgggggtgacatgggggtagccgcagtccaccctgtccttggctggcacggcacactggtttgcagctgtcccagacaaagccctgtcagctgccagagcccttgctgggctgcggtgagtgtgtttgcttcactttgcaagtttgcatcctcccgctccgccccaccccgccgagttcaaccactgctgaaaccctcgcccttaggaagatgcactttccctgtgaatatttaaagagaggcagtctgttaaatgctcagctcggggactctggccatttgcctaagtgtctttctccttggcacgctcttatcaccttctcgggaagtcacatacggacctgggtaccttccagctggcaggaacccctggggaatctggggtcccttgaacccagaaacaaagttacccttcattgtttgaccaacaaaaccttgcccctttgttttaaatgaaaaccgtgacaggagaggcacacgccatagagatcattgcaacgcatgctgcctgcttttcacttttttctgcatctccccttcctgaattgttgagcatgtcccaccctcccgggacatccttcagtccccaatattttcatgtttcaggcaagcctctatgtctgtatgtgcagcagaagttcactgcgtttcattaacgaactgagtatttccttaggaaaatggcaatcacgtgcagtgtcttacattcccttctcttgctcccagtccgtaattgcttatcctcctggcatccaaacttcgctcacactggaatcagctgcagagctttaaaaatgactgacgttggctgggcatggtggcttacacctgtaattccagcactttgggaggccaaggcaggaggatcacttgaggccaggagtttgagaccagcttggccaacatagcgaaactccatctctactaaaaatccaaaaaattagctgggcatggtggtgcatgcctgtaatcccagctacttgaagccgaggcacaagaattgcttgaacccaggaggcggaggttgcagtgagctgagattgtgccactgcactccagcagtgagtgacaaagcaaggctatctcaaaacaaaacagctgaggcctggatcttgcctggagatgccctgatgtaactggtgtgccccaagcattaggatttttaaagctctccaggtgattctaatgggctgcaagttcgggaaccactgcctttgaccctgctcagaagacacccagataaaagccatgccctcattccttcaaacttgggttaatggagcagccacaccccatggcagggttgctatgcaatggctaaatgaaccttgtgcctgccggtattgacagtgttctgaagtcagggtttttctcctgcatctttcctttttctttgtaaatgtggaacaatgcataaagacctatattgtaatttagaaatctccagcaaagatggctatggggtcataggggatgggctcaggctcaaaccctgatttcaacacagactgggcagggctgccttggataagttgttaactttctctgagcctcggtttccttgtctgtgaaatggggacaataaagacccacttcaaagggctagcgcaggaaaaagtgtatatgtgacaggtggccattattaaatgaatgcagaatccccccttatcctggatcccttcccttcacgcccaccctgccaccggggcagtcagggcagtactcacacaggcccacgtactcctcagcagagctggaggacagcaaggccaggaccagccccagcatgcagagcgctctggcagccatgaccaccgtgggctccgggacgcagctcaggactcgcttcatggtccaggaggcctcatttatgcaccgttgtttgcacagctgctctggattgtttgcttggggaaggctctccctcctggctgtggctgctcctgttctctcctgcatgcctttgtcaagctcccagacagtttttctctcccaaaggggagaggtcagttcagcccccactgttttggcagcaagcggtaagggcggattccagttctggttccgggtcctctactggggagcggatgtgtgtcaattgccctcctagcctggcctggtgtagtgtgcaggagccatgtggggtggcaggaccagggtgtggtgtccgttccatctcagcctcccagccagaagccctcagaacacccctggtcccatgacaagagagccccaggctgcttcatcccagatcggcctcggagacaggcagctctgagtgagtcaggaccctgcggctctctcacaactcctgaaacacagagattccttgtctttcctttttgctttctcccctaaaaattagtaactacattttaataagtggatgaaatgaattgattgaaaatatgttagtaaaaacatggtacacataattgatttttaaaatcaaataatacaaaagagcctttcctatccagaggcatctattgatctattgtgaacacttttttaggtatcctttcagaatttttctctctggatctaagcacgtttttttggtttgtttttgtttgtttgtttgttttgttttttttttgttttttttttgttttttttttttggagacagggtcttgctctgttacccaggctggagtgcagtggcacaatctcaactcactgagacccccgccctcgcggggctcaagtgatcctcccacctcagcctcctaagtagctgggccacaggcatgtgtccagctaatattttgtatttttttagagaccaggtgtcgccatgttggccaggctggtctcagactcctggactcaagtgatctgccttccttggcctcccaaagtgtcaggattacaggcatgagccactgcactcggccacatttttaacacaaacaggaactgactctccacctttgcccagcgtgctcttttaaaaactaaagactacatctcaggaattgttttataacaacatatcagatgagacagcgatgattctatccattttccagaggaagaaactaagactcaacatttccggtgcctatcagaggttactccagtgtccctggtatagctggtatttaacccactcccaggaccctaagcctccgccctcggcatccgcagcatcccccaaccccccaacctcctgcagtggactggctggtagtgggcaagagactaatctcattccaggaaaacgggcccctagattttgtgttctccgtgtttcttttccagggaggcattttgatgacccccactggcccttccaggagcctctgtctgaagggtggacttggtttatcaccccgagaaatgggagcgcctggctgcttggatttagcctgcagctggggtccccggtggtgtgtgcagggcggccttgagcctccaagggtgcatccacaaactgcccttccccgagtgacccatgggagctcgatggcgtacgtgctgagcaccaggatgtgtcctgccctgtgactcccaggccccgcccttgcgctcagcacgccctttgtggatggatttgagggcccctggcctctgatgtgccactcccgctgaggccagcgaaggaggaagaaggaaagagcgttgcctgccttgttttcggggcactcactttttctgggagacagcggacccaggttcatcaatggacagcaggattttcatgttattaaaaaggtcattgtaggggaaatccctgggggatctggtgagatctccctgggggatctggtgagatctccctgccttcccactgctcctagtacccagaggccaggccaggtcgtggtgcagggctgagttccaggagggtgcaaacaccccaggaacagactgctgcccctccggccctcatgacctgctggggaaggacccccgcaaggagcttctgcaggtgctgtggtctccacctgctgcactcaaaattgcctggagtggggagaatatcaatgcctgggccccgccctgacaggtggttctgtcgcctgtgattcttctctgcggccagcaccgagaaccctgctggggtttgcttccgtttaactagtgaatgttgactgagctcctactgcctacacccagggtttagggctggggaaggaataacaaaggtgacacattcttgtccttgaagagtccccccgcaaagggagacgggatcatgtcagagttaagatggtgaagccaagactaggttctgtgctgcctgaccttgggcaagtcacgtcccatctgtacctcagtttccctacatgtcacagggtgctcaccccacaggacagcatgaagtggtgctgcacagcccagccaggtgcctgggacacacactgaccacctgccgggtgtgctggatcaaccatgatggcagaggagaggattcctggtcccggctctggtaggagcaaaggctgtggcaagggggccagagctgggtcctgtcaggtggagacgcacaggcttctcagagaagggggatttgggctgcacctctggagaggtcaatggggaggcccgtgtgtgtcccctctctctgttctaggagccccctccccaggagccctgggctctgtacaggaacagaggatggcatgggagagcccaacctgccttccagagcctgcattcccacagccttccccagccaccctattcccctgggggagttccagttccagagaaaaagcagagctgttgtcagagctgtaggccgtgcggtagtgggcatcgggcccaacccagacaggtggctcccctgggcaacccaagacctgggggtgagcaggactggctctaaaggagcctctccctttcctccttgggagccgcatcccgcatccctgcagcagcctcgtcagctgtgtgcggtgtggcggtgtgggccgtcccaggagccctgcaaatccctcccaccctgggccttgtgcaggggctcctggatggatccaagaagaagacagtctgctcccccatgccggggctgcaacctttcacctcccggatgcgtggtcattgtcacgtgcatataacaagcacaagctgagcatgggtcccaggtcaggcactcggcctgcagatgtgggagccccagaacatcaggcagagcccgtgccctcagagctcacaggctggtgaggaggaacaagccttcaagcatgaattgtggtgcagtatgattagagctggcagagtggggtgaaatctgactaggtcttgagggatgagtacaagttcaccagatgggaggggtgaaggtcagaggggcacatttcattttattttatcttatcttattttattttatgttatgttaagttattttattttattttattttattttgagacagggtttctctcccatcacccaggctggagtacagtggttcaacctcagctcactacagcctacacctcccaggcttaaacgatcctcctccctcagcctcccgagtagctgggattacaggtgcatgccaccacacttggctaatttttgtatttttagtagagacagggtttcaccatgttggccaagctggtctcgaactcctgacttcaggcaacccatctctcttggcctcccaaagtgctaggattacaggtgcacgccaccatgcccggctaatttttgtatttttagtagagctgaggtttcaccatgttggccaggctggtctcaaactcctaacctcaagtgatttgcctgcctcagcctcccaaagtgcagaggggcaggtaaggccataacactgcctactttgcactaactcactgccccacagaaaactcagagttgatgtggcacatgcaggttatagggtctgcatcaccgctcagttttctggtattgtcactcgattactcaagcagcagacagtccgagggaggaaggaagtaggaagttgtgctaatcagcacccgtgggtggcccagggccgcacacctcccaggagcaccctgctgcccagctgtctctcggtctgcagctgccatgggtgccgcccctcactctgcacagaacttcctcctgcctccctgagagaggctcgaagacccttcctgagtcatcacgacctgaatgtaggtgctttggggaggcaaacgcagtgacccattcaaggatgcttctgtcttgacacatagtccactgaggacaaatgggggtggggaccaggagcagagcaaatgccaccaccacgtgtaaaacaggaaggtcagaacgcagagcagcccagtgggctcggaagggggcatgggctccagggttcccttgtgcagctcaaggagcacttggtgctgtttcagccactcgtcttgagaagcagccacagagccctctaaacccagagcgtctgtgggtttgggaccgttgcatcagccccacgtgcaagggacaggaaaggttcccagaaaggcatggactgacggccagaaataatgcagctgaccgcggtggacaggagcacctcacccgcagccccacctgctgggcccagatgggcccttccccagcagccagacctgctctaccaggaagcagagcctgagaggagggtgcaaggccctcacccaggcaccggaggcaccgtgtcacctcaccttccgtgtgatgcactccagtctgcagtcctgcactgagccagtcctgggccgacagctgggagcccctcttgtaccagacctgggctgatggcatgcagttctcagagacagtccctgaatgcattggtgcaggcagccaagttcaacagccccagacagcacaggggaccccatggggagccaggtcctcccaccaccagactgggaagccgcagccactctcggccttcggacttggctcatacctgtgagtcaagcctttatcaccaagtgattcccaagtacattgagttgaagggtgtcctccccaaaattcacgtccctcctgaaacctcggaatgtaaccttatttggaaataaagtttttgcggttgtaattaaactaagataaggtctagatcaagcttgttcaatgtgaggtctgtctgccacatgcaacccaggatggctttgaagacggccctacacaaatccgtaaactttcttaaaatgttatgagattttttttgtgatttttttttttggctcatcaactatctttagtgttagtgtatttcacgtgtggcccaagacaattcttcttcttctggtgtgacccagggaagccagaagactggacaccctcggtctagatggatccgctcgccatctggcctggtctagatggagtagggtgggccctaaatccaatatgactagtgtcattataagaagagaagaaacactgagacacacacaggggtgcagatgtgagcacagacggggcagggaggccacatggcgatggcaactggggcagagaccgagtgatatgcctgcaagccaaggaggccggggacttcagcacccccaggagccggaagaggcaggcaggacacttccctggagccctcagagagaggaggccctgtgacaccttgaccttggacttctgacctccagagctgagagagaataaacaagaataaacatctgttgtttaaaccacccagcttgcggtgctggttatgatggcccaggaccctcacacacaaggggcgcctggcagcagggtcttttcagcctgtgctttctggtgtgagggaagagggaagggaaggacacattgaacgatcccagtggcttgtctcatggtgacctctcccttcctgccctggcctggctccctggggccctggatgagctcttcccgggtgctcagtgccccctagccaggaccacgggtccactcggccgcctggatgcctttgaccccacacatcgccaggcctcggcctttgtccttcccggcacccatccgattgctggtctccatgagtccctggctatcatcaatccccagacatgtatttgatcccttcccaaactcccctgtcaccagaattatccccagtggactctttcattcccatttccttgtctcaggggaggctaagacaacactggctggtgagggctccgggactctcgcgttctggtggggcttgggctgggctctgcccgatggagggcagggcacgcggcagctcatgcccagggcacagcgggacagagaggcagccctgtgagaggctgtcaaagccaggacacttttcagacaggtgagtggaggtgctgtgaataatgatgccaggacaagagttgtggccagggagtgtgcctggcaaactgggaccaggaccccctgccaagaggacattccacaagccccccactgggctgcagtcatttccagagacttgaacactgtggaactaggacagagggaggaacaggcaccccccccaactttggaaatggagacacagtcaggtgatcccaacacacgtgtggcatagcatcatgccctgacatatgtggtcgtgcacagatggggaaggtacatggatacatgtgtgtgcatctggccctgcaatgggtcggggagctaaggagccacacagcactcacggggccaaccacagcactaggtgtctttgtctttgtctcccattctgtggggattggttccttctcttttggaaagaaaagtcagttaatcctatggtttctaaagtcacaaaacatagttgccatttaggcatagttgccatttaggagttgacatgtccagtcccatatgacaatcaaaattctgaacttgacttaaaattagatgttttcatttgatgccataaaggaattagtggacatttttagcatggggtggatctttgagtgtgtagctctacgtatatgacacacatatggatgtaaacgtttacatgtatcagtatctcttcaaggtatagactgaaatattatgtataatctgtggaattgtcttcaaaataattcaggaaggataattagaggtagtaagtatagataaaacaagattggccataagttgatacttgctgaaactcattgatgggggttcatcatactattatctctactttaatatatgtttgcaatttgccataattaataaattgaaccctctccctctcctggcctgctgctccaggggtaggaacagttgttggggcaagggcagggtagaggggagtaaggggaactgggaatggggaacggaagctcttcctatactggactgatgtttcccaggttggctccacattctctgggcccatcaggtgcttgaaacaaacgccttatctcatgtgctgcttccggggggtcttcaggggttcctcatctgcagatccttggacactggggatgcactttccactagctcatcaatttctcctcccatccccgggaacatggtgttgtctttggtttctctgagatgatgtctgctcccacctcaagtgtctctcttgtacaaagtctaggatgacggacacagttctcttgagctccatggcttacctgtggttcaccggacacatttgtgcctccttcaccccaacacactctgggatgcaggcagatcctaacggttcgtcctgttcctcactagatattagagtccccaagagtcagaaaccggtgtcctgtagcctccaaccatggaggacatgcaccacgctctcttggtggacccactaagacctcattcctaagacctgagactagagacaggcacaccccacccttaccccctgtggcaagatgacagtgagagagactcacagcatatcagcaactccttaaaaattctcacacttagcattttctacaaaattcccttcccttaaaccttttgtagcatcagtagaggcaaaatactgaagaatcatctaacaattctcagccaaattgtttttgatgtttcatggtctattgtctcactttgaaatatgacatctactgtttcttgatgtctcagctaaatctcctctccaacacccacaacaccaagagttccaactatatttattcattgtgttacgggaaaggcgtcctgatccaaaccccaagagagggttcttggatcttgggcaagaaagaattcagggcgagttcacagtgcaaagagaaagcaagtttattaagaaagtaaaggaataaaagaacggctactccatagacagagcagccctgagggctgctggttgcccatttttatggttattcttgacgatatggcaaacaaggggtggattattcatgcctcccctttttagatcatctaaggtaactttctgacgttgccatggcatttgtaaactgtcatggcgcgggtgggagtgtaaaaatgaggacgaccacaggtcactctcgtggccattttggtttcagtgggttttggccggctccttcactgcaacctgttttatcagcaaggtctttatgacctgtattttgtgctgaccgcctatctcatcctgtgacttagaatgtcttaaccgtctgggaatgcagctctgtaggtttcagcctcatttacccagctcctatttaagatggagttgctctggttcatatgcctctgacaattggattctgtatttagatataaaacccaaagacagaggtctaaatgtgtttcttgagggctcctactgggcagataactgtgacagactttggtgagagagaacaaaggcaaaaaatgtgtagctccttcccatgagagactttggagtataagggaagactagatgtgcagacaaattatggactttaccgaagggcctgaaagaagaattgaggaagcagagacgtgcctattcaaggatgagaagaccatggattctaaaggtggtaattttctcaaaataaactatatattcaacttattttctatcaaagtctcaaaggaagattgtaattaaatgtcacaaactgacttcaggatttaaatgaaaagataaagcaccaaaaatacctagtaaaagtttaaagaacggttcccaggaagaggaaaagaagaatcagaagatatctatcctatcagacattaagactgattacaaaactactgtgtttaaagcagggaagtacgggtgcggggataaaatcagacaactggagcagaacagaaaggtcagaaatagatccatacacataagaaaatgtggataatatatttgatatcaatggggaaacaggacaattgaataaatggtaccatgacaatcagttatctgtattttaaaaagacaaattcagatccccacctaatgacgctaagctatttttaattatctacattgaaaaaggtaaatttagaaccacaatttaacaacccattaacaagttttcctctctgccctggctggcttcctggggagctggacgagctctgcctgggtgctcagtgcccctgagccaggacacttagtactgcggtccgtcccgtttatgctgtgtggctcctcagcttcctgacccattgcagggccagatgcacacacatgcatccatgtaccttccccgtctgtgcatgaccatgtatgtcagagcatgacaatatgccacatttgtgttgggattgcttgtctgtgtctccgtgcccaaaactgggggagtgcctgttcctccctctgtccaagtcccacagtgttcaaagtgaattacaggcccaaagtgaaaagtaaaactttaagtcactaaaagtagagatagtcaaccagctcatactagaccctgcccttcttgatataacaatgaaaactctggaaaaagcacaaagcaatggcctgatggcactggaaagtgagaaaaacaaaccaagcacagctgtctgagatcctggaggggagctgaccctggaagaaggagagggaatgctgcgaatttatttctgtatgggattttgcctgagggtaggtcacagtgggtgttgtatagttgcggctaaaacaccagtggaaacctgtggtccttcaggctggagaatcactgtactgagaaaagggcaaacccagctgcaggaaagcgaaagaggaatcccagaaaggagagagctagagaggagaagctccaaattctgtgtgaaaacccttcccaagtctctctctgacccatggaccatccacatacaggacagactctggctaaagatgaagaaactgaagtttgaatgacacccaagaagcagagtttgacgtttgaatccaatggagatgattgcctgtcaaaacaaacatacaaaataaataaacaggcaaacacaactatcttcagaggaatagaacagaatctgcattccccacaacgtagcaacacaatgtcctggccacaatcggaaattactaaacacacaaccaacaggaatgtctcatgcgttctgaagagaaaaaaagccatcaacctgagatgacccagacattgcaatgaccagataaagattttaaaacaattagtataagtatgcttgaggaaataaagaaatattgcttataatgtatgtaaaaatagaaaatcccagaaaaagaaaatttaaaaactgtgtaaaaataaccaagtagaaagtatagaactgaggggagtcaggtgtggtggctcatgcctgtaatcccagcactttgggaggctgaggcgggtggattacgggaggtcaggatttcaagaccagcctggccaacatggcaaaaccccgtctctactaaaaaatacaaaaaacaaaaaattagctgggtgtagtggtgcacacctgtagtctgagctacttggaaggctcaggcaggagaatcacttgaacccaggagatggaggttgcagtaagccaagatcacaccactgcactccagcctgggcaacagagcaagactctgtctcaagaaaaaaacaaaaagaactgagaagtatatgtgtgaataataaatctacagtgaatataaactaaataaataagtaaatgaaagaatagtaaatatgtacatgaaagtaaaacgtattgaagtcttagagtaaagtgaagatgacagaggaaagtcaattaacgtaaaagatagcacactttaaattatccagtttgaagaatagaaagaaaaaaaaggttgaagaaatgaacaaagccccaactacctgtgggacaatatcataaagtctgacagcgtgaaatcagaaaaaaaaaaaaaaaaaagtggccagacatggtggctcatgactataatcccagaactttgggaggctgaggtgggaggatcacttgaggccaggagttcgagaccagcctggccaacaaaacgaaaccctgtctctactaaaaatacaaaaaaattagctggacattgggatgcacacctacaatcccagctagtcaagaggctgaggcacgagaatctcttgaacctgggaggcggagactgcagtgagccgagattatgccactgcactccagcctgggtgacagtgaaactctttcaaaaaaaagaaaaaaaaaaaagccagagaaaaaattaagaatgctgaatctttgagaagatatttctttttaaaagataaacctctaacgagactggtcaggagaaaaaataaagaaaacacaagctaccaacatcaggaatgaaagataggctattactatcatggtacagacattaaaaggataactagataatatttagagtaacttaataccaacaaatttggtaacttaaatatgaaatgaacaaattccctgtaaaacacaatttaccaaaatggacacagacaaaaaataggaaacctaaatagtcttatgtctattaaaaattttgaagttgctatcaaaaaccttcctacaaagaaaatcgcaggcttgagtggtttcactgttgcattctaccaaacacaaatgaagacctttaatccatacaaacctaggaaaaagatgagctgggcatattttccgactcactttatgaggccatcataagcctaatatgaaaacttgacaaatatattatgaataatgaaagagcaacatcaacacagattgaaaaatacttataaaaatattagcaaattcaacccagcaagatataaaaacaatatgtcaagatgtagatttttttttctaagaaaaacaaggtagagtttaacatcaaataatcaatgcagtttaacagaaaaaaattttaaaacatgtaatcatttcaatgaatgtgtaaaaagcgtttaacaaaattaacactgatacatgataaaaattcccagaaaactcggaataaagagatcattcttaagctaataaaggaaatctacaaaaaatacaacattatactaactggtgaaatattgaatattctcctcctaaaatctaggccaaagcaagaattcccactctcatcacttttatttaacattgtaatggtgcttctagcaatggtataaagcaaggaataaaaggcataaagatcagaaaggaagaaggaaaactgtctttattcaaggaagatcatttgattttcaattgcctgttgctaatatatgaacaccattgatttttgtatattaactttgtttcctgtaaccttgttttaaagaattttttaaatagattttttaaaggatgctctaaaatagcacaaatcatgaaggtgcagttgataaatctgactcaattacaattaaggatatctattcatcaagacatgatagaggagtaaaaaaaaaagtctagtcatgaactaggaaaagatatttgaaacccatgtaactgacaaaggattgctataaaggataggtaaagaactccttcaaaccagtgagaaaaagacaaataacatgattttttaaatatacaaataggattgccactgaaaagaaaagctaggtagtcaataaggatatggaaagaagctcaacctcacaaaaagtcaaggaattacaaataaaccaatgttaaaatatcactttacttaacatcagattgcactgattaccaaatgtcgacaagttgtggagaaatagaaactcttatgcaaatctggcaaaaaggtaattgacacaccctctttggcaagcattttgacaacagccagtaaattgaagaagtccgtattgttctgatagaaagaaactggaaacattatacctagttgcctatcaattggggattgaatcctgtggaatattatacacatgttaaaatgaatgaagcaaatatatttttattaatgcaaatacatttcaaaagttaaaaataagatataagttgaaaaggctgcatactaggataccatttctgattattttaaaaaacaacaaaataataccatgtattgtttatgggtatcatgggaataatgcccactgactcaggaagagtggttaattctggggagggaggaaaaaggatggattaaaggagtacttttatgattttatttctttttaaaatgagaggcatttttaaagtgagaggcatcaaggcataagtaactgacaagttgatgaatctgggtagcacatatatagatgacactacattagataccattcaaggaaaggcatttgacatatggctatttaaaatttttatttaaagaaatccaaataacgcaggtggtgtgggcagcaagtcccagctgctgggtgtgagagaggctgggagaagccagccctgaggctgggagtggcacatgggtcctggtttgggggccattctcatgcttcatcccggttgcctggccaataccccaggggtttatctggtgagggatggggaagggaccactgacagagtaggagcattgccatcttggacaagcaccgccattttaaagttcaccttgatcaaaaactgcctaaatccaaagggcatcagcctaatggctaaggtcagcaggaccataaaccacaaatgacatctctgaccagaaactttccaaccataagaaataaactcctccccgaccagaggcatgccaggcccaagataacctcccctccagccagagacattccaaccccaccataaagttctccccaacacggaaacattccaagcttgtgataagctctcaccctaaaaccaataaatactcttagtctgtaagagagagtgctcctgaccaaagtgaccagaagcccctctcaggtttattctccaaaatcaacctgtctttgactgttgagccactttttgcatttctttcctctttctttaactcttacaaccacttttaaatcccagaagcatccagcttgatggcaaataaaagtcttaagtcctttcacattttaaaattttaattcccaggtctttgggcccctgcagtgcaatctcaactttctctctatattagcagagtcgacagatccacctgaggatgagtgcctgactgtgtcctggacaagcaaggagcttgaactagagagggaattaacatcccagtggagaagcactagaaagagtcaatgtttaatacaagtaatctctggatcaaatgcaccatgggtgtgtcacccatgctgtgccccaggtcatccctcccctcgaagtctgtcagagaacataaactaaagattatttttctgacttcttgaaaatgaccattactttgttcaaagagaagaagggtcattggtggctgctcaccactagaggagaagaaacggtctctttgatttttcatgggaatctagaaatagaatggtcagaattgaaagtaccttacatctcataaaatgcaaccatagctggtgcctaatcccaccacattctctgcaattgttagcctagatgactagagagtagtttttagggaattcaaaagaaattgaaagcagggcccacccttaagaaatatgttgtctaccaaaacaaaaacatggtgggactatcagaactgcaaagtgactgtatgagatggcccagatggaaaccacacatgacctctggagccttaccctggggcttccctgtttgtgcagagaaaagggtgatttccctgtgtggaggaggagccccttacagtcggctacctttccagggctggtgtccacaggactctgggtggtttgtgctaaaggtgccctgtggacatttcttaggtttgaggcaggcatgcctctcacttgactcttcctactcaccatcagctccatgtttcaaaggatgctttttccctgctgtaatgtattcatctcattcactgtttactccatccaggaactgaaagcaaagtgtgagatcacaaaatatggcaacatcttcaggcaagagcctaccttaattgccaatgcctcctggtggctcttcattatagaggcagcccatgttctcaagacttataatagccctgttttacatatcaaatggcaagaagctaaataccaactctccttaatacattattcatacttccgtggcactcatatgatatcttgtttttcaatgtcttaaggagttttaccaaagagttaagatttgttgagttcctatggacagaagtattattgaacaaagaatatcagtcaatatttatttaacatccactgtgtgcacagccttcagtccaggtgctgtgggaggttacaaaagaagaagatgatatggtcagtgttgataagaaagctgcagtcatggaggcatcataaactccaactcagcccccagcattatgaaatccatgcagcattcatatcgatatgtcgtgtcctctagcagctcaacatattaagaggggttgagaaggtaaatatggtcatttaaaaaatcaattcacagatacacatacagtcaacagggaggaaaaatatgtggttttaggcctcaatgttagcacaacactcctaatagaggaagtcttaaagggaaagaagactctgaattggctctgccaggcagaggtgatctgactgagtcaatggagatgtgttacttgagaggtgagaaagaggatagtaaatggagatgcaacaagaaaatacctttctccagggcagcagggcagggccagacagtcctgagactcagagtagaaatggtggatgatgccctggacagcccttgggcagaagagtacttgacttccagatggcagctgctcaagaacccaaggtgcagtggccatgacctgggctcttcactctcctctaccctcttaggttcttcagctctctgcaaattaaacttgttaaaaaggaagattaacaggagaaaaagaaaacaaacttgatgttgatattttaatttttaagtgcatagagaccttcatagaaaagaaatgaagatcccaagaagtggttacacctaggggcttatataccactttaacaataggtaataaattatggagaagtgataaggggaagggaaagaaatttggagtcctagaggtgggaaattgtgggaaggtaaatatctgagggaaactaatggaagatgagggttattttagtaaagttcatttgtgcagacccatctcagtgccaactttcagtcccctggtaggggagagaggaagaaataccttcacaaaggaaaatttatgtcctgctttgaggcagattaaggaggccaaagtgctctttctgcatttgatgcttcttcattgccttcatctcaaaataattcctattccaaagcggcatatctcggggatagcaattctgatctccttcactttcatctctgctgaggtacaggaagactgacaggtgatgccccatagggtctagagacagaaaagtggaattcaagttttgtgggtgtcattggacatccagccatagtttcctgctggataataatgatgccttccttgcccaccctcgcaaggtaggtgtgaggctcaagcaatggtaggcagtgcaacctgaagggtgaagcactgtccacctgctgttagcagatgtcattgctgttataagaagtaaacacacaatgactactctatagtggttgtgactgtctcaagatgcaaactctgtagacatactcaatcagtccctcatgattctgttcagtttgacttgacctaactcaccggccagcctcctgggctgtctccccctcgaggtttcatgcccagagtgactgttcactcctggagcagatccttgccttcaccatcccttctagctcttctcctgagcctcctctgcttgggtgggagtggctctcagctcagctccctgccaccccagctgcaggaggatggaagtcattgattgcagtagggtgtgtgtgaaagtgggatgggtaaatgaagacaataaaccatcttgacctggcccgaagctcacaggtttggagccttgcagtgcagtgctgacctctgagcccagaagtcagttttccagcaaatggcatggctctggtggctgaatgattaaaaaccttcagcaaaggaggctgaatgcctgctgatcatcagacttttatagattccaggtaaagcaaaggcaggaagagaggcagggaccctgggcttgtttatttgacataatgagggttatttggtcataattcaatacactcaatgtgccaaggtacagtttgcaaaagaacacagccataaagcaggtgagttcagagaaatccagagataatacaaagctcatggggttattgtgagtgacaaggaatgcagaagcaagcactgggatcgcatttcccaacccccaccccactccttttttttctgagacagagtctcactctgtcacccagactggagtgcagtggcatgatcttggctcgctgcaacctccaactccagggttcaagtgattctcctgcctcagcctcctgagtagctgggaatacaggtgtgcaccaccacgctcagctaatttttgtgtctttagtagagacggggttttgccatgttggccaggctggtcttgaacttgcgacctcaagtgattcgcccacctcagcctcccaaagtgctgggattacaggcatgagccaccgcgcccggcccccaaacctttttgacttgtgaacacatttcacagggaaaagaaacccatcttacccatcttgtttggaattttacaaaaacttatttgcagtaaccttgtctggcataagataagatgaactgatataaaactattttattttagataagcgtttcatcaaaaatgcaataattcagattatggtcatttgttttcctttttaaccttatttttaattctagagaaattttgatgtgctctatgagacttttaagccaatccatcagataacttacctattgaaaagcataagatgaattggcactattgtcatttttattattattgtcttatcctcttcctcattagcacctttcttctcttctctcttccttccttcattcctccctccctctctctctttctttctttctctctctttctttctttctctctctctttctctctctctctttctttctttctttctttctttctttctttctttctttctttctttctttctttctttctttctttctttctttctttctttctttctttctttctccttttttgacagtttcactcttgcccctaggctggagtccaatggcacgatctcagctcactgcaacctctgcttcccagggtcaagtgatcctcctgcctcagcctcccgagtagctgggattacaggcacacaccaccatgcctggctaatttttgtatttttagtagagacagggcttcaccatgttggccaggctggtctcaaactccagacctcaagtgatccatccaccttagcctccctaagtgctaggattacaggtgtgagccacctcgcccggccccctacatttcttgactggtatttcttttcctttctgctgttaaccaacagctattctgatgaaaaattaatcaatatattgctaaaatcatagagctttgaagcacttgatgaccaaaactgatgtaactactaggaccttgagctgagcaggggctgcaatctcaacatcagacaaaatagaattcaggccagcaggcatcagacatgatgaagacagacgcttggcaggtcacagttcacaatggagcaataacagttataaatatttttgcaccaagaaagggataggaaaagtatatttattttataagccagaaacagtgagatacaagcagaaatagacaaaacccataactggtcatgagaacatcattctgaagataagacaagtcaagtgaacaaagaaaaaagtaagtaaaaaaatagaactcaaggaatataattaataaggcagatctgatgaatagacatatacactgtgtatgtatgtatacatatggatatgtcaaagtttaattcccaatattaatacaacttcttctcaagcacacatgaaatattcacaaaatttaatggtacatttgcacacaaaaaagcaataagttccataaagtaaaagttttggctgggtgcagtggctcaggcctgtaatttcagcactttgggaggccaaggagggatgataacttgaggccaggggttcaagactagcctggggcaacatggcaaagccctgtctctactaaaaatacacacacacaaaattagccaggtgtggtggtgcacgcctttaatcccagctacttgggagactgaggcatgagaatcgtttgaacctggaagacagaggttgcagtgagccaagatcatgccactgcactccagcctgggtaacagagagagactctgtctcaaaaaaagaaaagtaaaaatgttataatcactctatgatcaagtgcaacaaaaccaaaaaatattaacattattgcacatggaaatggaaatatcttctattaaatacttgtggctaaaagataaattactaaccaaaattatagaatattttagaaattatgataataaaaacaccacatttctgaatctatgggcaatatttaaaatggtaattagtggaaagtgcatagatttaaacacatgccattaatccataaattgaattcccaaaccagaaaactaggaaaagaatagcttgttgaaaaaaggctgaaagaaagcaaagggaaagaaatcaatgaagtacagaagagaaaaagagtggaattctttttcacaaattcaatcccagttatttttaaaaattaaacaaaatatgcaaaccactggctaacccaataaaaaaaatgaaaaaaggatccacaaatatccagaataagaattgacaatgaaggaaacaactattgaaacagaagagtctttaaaaacggtaagaggctaccctgaataactttatgcaactaatttttaatatctagatgaaacgcgtaagttcctaggaaaataacagtttaacaaaatgggtccaatagagacatagggctgaaataaaccgtagaagaaatggaaaacgttatcaaggagctgtcaacaaaatcattaaacaggattttgcttatttttttaaaaaagaaagagactttattccagtaaacattttgcaaaccagggagacacccccttcggtacaaaacaaaggtgcaatctgagacaacaaagagaggggttgtcttttaaagagaaagctccctctgggttcccactctcgtctgctatgcaaataggggatgcaaacttgcttagctgtggttagttgacgcttgtttagttctgattggtagatgtgggccacattctcctggtgagctccaggggccgaggggaggctttccagtagccgttgatacaggagtgaacaggagcagctatgaatgtcccagaacgaagcaaacatgtgggtttccaggaatgcagagtacgtgtgtgacgtctagtcagcaaatggccacacggctctattttgaatttagccccagttggctccccgggatccaccttgaagggctggttctttcgggattcccagaaaaaaaagccgtaagaatctccatgtccagataatctcacagggaaattctagccaagcttcaagtacctaacagtcccaatgctgcaaaaattgtttcagacacttaaaaacaaaggaaaatgcacaaatttatacaaaaatgtgaactgaaaatgtgtcatagacaaaagtataagcaccaaagttataaaactcctagaagagaatataatagaacacgtccgtggccttgaattaggcagagatttctaggtaggaaacataaagtttgaatcataaaagaaaaatgagaaaaactagatttcatcaaaattaaagatattttctctttgaaaaatattcttaaggaaatgaacgaaaaggtaagtcacagactaggagaaaatatttgcacaaaatatatctagtaaaggacttgtatgcagaatatataaagaattttacaactcattacaaagaagaaaaagacacctgagttaaaaagtgttgaagatttagacagatactttacctgagaagatgtgtgaaaaataagctcatgaaaagatgttcaacatccttagttactagtgaaatgtaaattaaaatgaaaacaggatatcacattccacacaccacaatggctaaaatgtaaaagactagtaaaccaaggatgtagtaagcatttgcaaatctcctccattgtggctggggagacaaaatggctcaatccttggaaaacaattttttcagattcttatgaagttaaacataacaccgtactatccagaaatccactcatagctacacttccaagaaaaaaggcatttcctcaagcatttacccaaatcccttcacatacatgtgcataattgttcatagtaactttacccataatagtaaaaagctgggaataatccagatgtcatcacctggtaaataggtaagcatattgcagtgtatcctgctgtggaatactactcagcaatgaaaaggaacgaaccacccttctgtgcaacaacctggaagaatctcaaagaaagctgtgtgctgtgtgaaagaaaacagacttcaaagactgtgcactgtctgcactgtgtgattaaacttacttgaaattctagaagaaatgaaactaaagcaaaaaaacacagattcttggttttctggcgctagggagaggctattgacagcaaagggcacgacgggattttcttggagggaatgaatgttctacatcttgattgtggtagtgtttacacagttgtatacatttgtcaaaactcaatgaactgattcatttaaaatgggtgagttttattgtatgtgaattatacctccgagaaactaatttttaaaaaaatctcaaggcatgagcattgccatcatcagcgttactaatgtgaacacagtgaactgatgaaatgacggggcaatttgcaacgtgtgataggcactgagatctctctctggacatcaggaagctgcgtgttgtcagatgccgaagccgaacccacttgcccattgggctgcaggaaggctgagagtctgtccccagcatggatagcagagggcgctgtggagcatcattagcctgtagggttctttaggggaaaacaccttaatgagccctgtgcgctcggaaggttgaatagagggcccttccttcctctaagccacatttctggttgcgccacattaagtcaaacaattattaagtgctgagcagtctttggatcacagaaaacaaacacagaggctgcagccactgggccctgtggaaaactggcggccgtcctgcgatggtgtcagctcatccgtgtccgcgctgctggaggcctggcaggagctgagatcagagcccttcagcgggagtggggctactcctccctcccctggtttccctggaagctgagaaagttcccaggaaagtgctgaaaacctcccaccactctttacacagacctgagagggggctgaggtgggggaagctctgttgcagagatgggctgactcggggaataggccggtggggcgggacagatgctggagggacagatggggcgtcagaggagacagaggctgtcagggagctgtggtcctgcacatgggaaccagtccttgcccagcctgtctggaggcccctgggctgctgctagttactgagagggcgcagtggccaggctgcacctccctgtggcctggtccctccactagctggaggaaggtggggctgctccctcccagccagtgccgagtggctgcagacccagaagacacacgctgtatatattcctgcatgcatggccctgaaatggtggcctcatgggttgcagtgtccacgctgcttccacaaggaagaaacggctgcttgctccacgcctgggggccccaaggctcaggcatccttgccgtggcccacccagcaaagtgcagcaagagggaaggcaacacgcctgcctatttcactggcaagggcaggcccccaggggtttctgggagaggtacaatagcagagttccagcttggggtggggatagctatgtgtcaggaccacagcattagccagggccacaggcaggtgaggcagaggtaggcaaccatggaagagcccctgggagaggaaccccgatgtgcttatggaggggcttggtaggcattggccctcctgtgtgagcaggtggaatgctgagggtctgatggccgggtgcccgccactgggacagtcactgtgagacaaccaggaccacgtgtgtcttcccggaagaatgggcctaggatatgaggatgtgcatgtatgaacaatcatagcaagaacagctctaagcacatcctaattcaactcatgaagcctcaccacaaacccagaagggaagatgttatgaatatctgtacttagcatatgagtaaaactagggtcaaaaagtctacgtaacttgtccaaggtcacacagtgaccctgagagagaaatcgctgtagagccgaagtgcgatagatatttttgagatctgattcacacaccctcattgcagccccctgactccagttaactgcccagcatcccatggtgggggtcagattgggcttctaaggcagggtgggttgagggggacatcacactggggctggcccctgaagcaatagctagagatattcatgcgtgtaccacaactccaaactatagataatgaatataaaatgcatgtaatgaatatgcagtctattcccattacatattctctatttgcaaattcgcctactcactaaaatttattggtgaccctaaatcaatacttggggtgctttcaaggtcgtttgcagaaacgtacaaagtggtgacaaatttgagtcacagacatgcatattcccaactgaagtcacacaaggccttttttatttttgagatggagtcttgctcttttcgcccaggctggagcgcaaatgtgcgctcgcagctcaccacaacctctacctccaccacccaggttcaagcaattctcctggcttggcctccagagtagctgggattacaggtgcctgccaccacacctggctaacttttgtatttttagtaaagacagggtttcatcgtgttagccaggatggtctcgatctcctggccttgtgatccgcccgccccagcctcccaaagtgctgggattactggcatgagccaccatgcccagccacacaaggccttcttgcctcaacccatactgtgaactaatgtccttttcttggtctatgtagtgccacgtttttatgcctgttgttggtgatttcccatttaagatgcccccatgtgccatagtgaggagctgtctggtgtcctgggtgtgaggtgatatgcctctggggaaaacaccaggggcagggcagcctcactggggctgggagacagggtgccggcctggagttcagcattaatgtaaccaccgtgtgcactccacaaggtgtctacaggaaacaccctcgagcctggctacatatggctggttaatgaaatgctcccagaagcttgcagaaacctgaccctgtacttccccaggagcgagggttccagattcactaagtcagggctggcagcgacttcatagagcttaactacatgaatgccagaacgtactgtatagatacccactataaatcagcactaaagtgcctgtgcacatacagctgtgcagcacttaacgacagggaaatgttgtgagaaacgcgtcatgaggggttttgtcgttgtgtgaacaccgtagaatgtgcttaatgcatagctagagggcagcgcctgctgcacacccaggctgcacggttggctcccaggctgcaaacccgtgcagcgagtgactggactgaacactggaagcaaccgtaacgcagtggtaagcatttgtgtatctaaacatagaaaaggtacagccaaggccgggcatggtgacttatgcctgtatccccagcactttgggaggccgaggtgggcagatcctgaggtcaggagttcgagaccagtctgaccaacacggtgaaaccccgtctcaactaaaagtacaaaaattagctgggtgtggtggcgagtgcctgtaatcccagctacttgggaagttgaggcaggagaatcacttgaacccaggaggcggaggttgcagtgagccgagattggtgccattgcactctggcctgggcaacagggtgagactccttttcaaaaaaaaaaagaaaaaagaaaagatacagtcaaaacatggtgtgaaagataaagaatgggacggtatgtaggcacttaccatgaacggagcttgcaggaccggacaagacagggagggagtggggagtgaattcgaaggcccaggacacgactgtcctaccatagacttcataaacacacgacatttataaaaaatactattctttcttcaataataaaattaacctcaacttactgtaacatttttactttatattttttttaatttttaaaaattcttttttttctttttcttttttttttttttttgagatggagtttcattctgtggcccaggctggagtgcaatggtgtgatctcagctcactgcagcctctttctcccgggttcaagtaattctcctgcctcagcctcctgaatagctggcattacaggcacctgccaactcacctggctaatttttgtacttttagtagagatggggttttaccatgttggtcaggctggtcttgaactcctgacctcatgatctcctgcctcggcctcccaaagtgctgggattacaggcgtgagccaccacacctggccaaaattctgactctttttaataatacttgcttaaaacacaaatgcattgtgcaactgtacaaaaatattttctttctttatatccttattctataaactttttagtaattttaatattttttaacttttttagactttttgttaaaagctaaaacaaacacacattagccgaggccctcgcagggttaggattctcactgccaccgtcgtccacctccacatctcgtcccactggaaggtcttcagggccagtaacacgcaggaagctgtcatctcctatgataacaatacctgactctggaacctcctgaagggcccgcctgaggctgttcacagttaactgtttttatataagtagaaggagtacactctaaaataacaataaaaagtgtagtatgtacataagccagtcacactgccatttataatcatagccagtattaggtggtgtacatgattttatgtgctgtactttcatacaactggcagtgcagtaggtgtgttgactccagccttcccacaaacagcttagtaacgcgtcatgctgtgacgttacaatggccctgatgtcaccaggtgatggaaatttttcagcttcattgtaaccttatgggatcacagtcatatacgaggcccactgttgaccaaaacattgtcatgcgtggtgcatgactgtgtatgcggcgagcgctaggtatagtgaatatataaagaataagtgtgtgttatccaggattaccacattctggaggcagagctggctgtcctacatggtacttggaagaagtttgtttatttttttgatacggagtctcgctctgtcaccaggctggagcgcagtggcgtgatctcagctcactgcaacctccgcctcccaggttcaagccattctccttggaagatgcttttttataggaggccacaggacaagaccacaaggccaccggcggcctctggcaggagctccatgtagtgggggcctgctgtgtgcaccaggcagctcacaaacattattattattattattattattattattattattattattattattatttgagacaggatctcactctgtcacccaggctggagtgcagtggtgtgatcacggctcactgcagccttcacttccccgggttcaagcaatcctcccacctcagcctcctgagtagctgggactaaaggtgtgcccagctactttttgtattttttgtagagatggggtctcagcatgttgcctaggctggtcttgaactcctgggctcaagcaatcctcctctcttggcttcccaaagtgctgggattacaggactgagccaccatgcccagccacaaacgttatttttaattttcgccagaaccctgctagggaagtaatcattactcatattttacaaacagaaagcctgagaatctgagagatttttaaaaacctccccacggtgacccacctgggccatcaacctgcacacatggtgacagctcctgctgttcccacccccagcgagctgaccgaccccgtctcctataattgcttctcaagccatctctgttacctggaccagccaggcagggacctggaggagcgcagggagccaggagggcaggcagttgacttgagggccgcagcggctgtcctggttaggtcgatggccactgggccctcccgccaagcctcaccggctctgccatccatgaggtccctgcctgcactggatagggattattggagcctctgcagggaaagggaacagaagggaagggaaccaggggcaagcagaggagacgagaagcagcaggagaccccaggaggaaggggcagggaggcaatgattgggggagaaaatggaaaagagggcgaagggaaaaggaagccttgttttactcaaggggtgggttcaaatgtcaccagctgttgctccagggcccctggggggaccccccaaaggaggaggaagggggtggcccactctgagctatcttgtggtggcacgtggttaattaactcactcatagtgctggagccagcaggagctgtactatcggtaacagatcagagtggcccacggacccccaagcccaggcccatggcaaacacaacggaagttgcttcagaatgcctgctcaaggatccgaagggcaatgtaggaactggttcagaaactggggccttcatggatcagagaatttctgaaggaggaaatgggattggagtaccagcatgagaagaaagttcccagaaagacaccatgggaaacacaagtgcccacatattaaagacgttcctgcacctagagcctcatgccaagtggcctgcagacaactgcctgagaacaaaagtctgcagaccagaaactgcccgaagaggcatgaaaccagaagctttcacctcatccggcacccaagaaggccccagtgccaactccgggagcagaacctccacactcttcacccgggaggcacagaaaattcacatgcccctggagagcatgccaaccaccctttccaggaatccactggcctgatttggcttttccgccagtgtggccagggctggctgaccctggaacccataaactaagtgtactgggggggacaaacgagagaggacacggcagtctgggaaggataaattcacaaacatgagcatccgtctccgccacctgattatcttgagtgtttctgagaccccgtgttgctaacaagggccactgttcattgagctgatgatatgttgtaggtaagactgagacacagctgagacccaaggcagcatgtggcctcctcgcaaagcaggcatccggagagttgatgtaaggccacatccgttccttgaagaagcacttcctaatactcccatcttccaataggaagctagtggcactggccccaacccaccctggagggcagaggccttggattttctggggtgacaggagtgggctattgggtgacacatttgctaaggcaattggcttcgggtaggagagggatgttgggggaagcaacagaaagactggcctagcgtcatccactctgcactcccaccaccgagctgaatgacaccaggacctcttaaaggagacacaaaagaatctttcaactaaacacagagctgctattcaatgcagcagtccccactgagtatctatccaaaggaaatgaaatcattctatcaaaaagatacctgtacttgtacatttatcgcagcactattcacaatagcaaagatatggaatcaacctaagtgtccatcaacaggcaaatggatttaaaaagtggtatgtatacacaatgaaataatattcagccataaaaagaattaaatcatgtcttttgcagcaacatggatggaactggaggtcattatcttaagtgaaatgaactagacacagaaagtcaaatatcacctgttctcactcgtaagtggatgctaaaaatgtgtccacgtgcacatagagaggaatggtgggcaatggacatgtggatggctgacgggggtagggggcagatgatgagaagttagttaatgggtacagtgtacgtgattcaggtggtggacaccctaaaagctctgacttgactactatgcaaactacacatgtaacaaaattgcacacgtaccctgtcaattggtacgataataataataataatgaataaataagaatatttcacacagtgatctccgcacggctggcattgccttaatgaaatgctgtcaacttcctcccttgaatatcctcaactgttagcagattaccaaagctaccctcaggcagaggccagaaaacacagaagcaaagagttgggagagaatttttggcctacctggtcaaggcccctccctgcttgccttagaaataggagacgaccggctgccgcacaatcgtctcaaaatcgaggggtctgcgatgcattcggtcaaagagaaaggattttgcaattgcaatctgaagtcacgtatcactccaagaggtttttagggctagtcatttgagtttttataaaaaggactgagaatgggagttacaaagtgattgtgaattctgaaatgttcttacatgcaatacttttttattgcttttagagaaacctgaatgtatttgatgaattttttctcttagaaaaatggaagggacattaaaactgccaggcatggtggctcacgcctgtaatcccagcactttgggatgccaaagtcatccactttgggaggaccacttgatgtcaggagttcgagaccagcctggccaacatggtgaaaccccatctctactaaaaacacaaaaattagccagtgtgatggtgggcacctgtaatcccagctactcgggaggctgaggcaggaggatagcttgaacctgggaggaggaggttgcagtgagccaagattgcaccattgcactctagcctgggtgacagagcaagactctgtctcaaaacacacacaaaaaaaccctgcatatacactcacacatatgcacattcgcacatatacacacacccatacatgggtacacacacccatacatgggtacacacacccatacatgtgtacacacgcacaccaccattaccacctctgtgttaatgaaaccaaaaagaaatttagcagattttaagggttttatttaaagaaattatatgttaaaccattgaaaatgaggaaaagatggttaagaaaacccaggatttcatgaagtatgaagctgataaggcgaagtttcttctttggtttcggaacacccggtgagccagatgcatcctctggaaccagcctctcttagtaatggcagtctagaagtttaaatgcaagatggttggtaagggaaccccagaaatgggagtgcctaggctgcgaagctggggtgggcgtgcatcactttgcccaggagcttcctactgaagaaggagctcctttcccggggagggggtgtaaagggaccaaatcttcccaccccaggccagagtttcctctgtggggcgcattctccccagacaagtgaacattttctaggtggacctttaggtcacataaaaaaaatcactcggaaaatcctgaacatgaaatatttcgctctttggagtgctttgatatcctaacaaaaggaaaagaaaaggcatccttcaagggccagtagctctttccccattttcctggatctgcttggtctttttttacctcgccacactccgagtcaggaacacactatcactaagcgggtgggagaagtggacccgttcacctctgccggcgggaccctcccgggactgcccggagcaggacgttgtggatgaggtttgtcattcggggtcatgtgggggagaacggggaagccacgggagaaggggccaggtctgcttgagttgggccctctctggtacccagcacagtgcaagacactcagtagcctccaaatgcagatgggcttgcaataaaacaggcaacgcctctgaacgttgcaacacctggggaggcaacagggatgagccgctgtttctagagccatcacagatgacgcagtggcaatgctggaggctataaacttattgaaaagacgctgtctttgccaagaacattctggaattgccttcagaatcccataggaggcaggggccctggcctcgatggcactgaggctgcgaggcagctcccctccctgcaccccacctctacggacggaggaggaatcatggtgtccgggaaccagacagagagtcccacagcgacgttaccttccacagacttcgggaagaagcaccagggcacttcaaagatgaagttggagaagcagcacttccgagaggcgcattcctcggggctgatgcccgggtagccacagtttcttcggtctgagacctccatgacgcactgatccgactctgccatgggacaggcacagcaccgagacccagtcaggcctgctgtgccctggaaagctccaccccttcctcctctgagagcagcgctgatttgcagcctccgtggatcatgaggtgctgcctggggcagcatcccccgggacggcctcccccggggactgtggaagtgtcggcccctgggaccgcctcccccggggactgtggaagtgtcggccccagcgacgcttggctggcctgtcctccgcgaaggtggggcccatgtggggtggtcacagtcagaagctctggagtcccccgccttggggaaatcattttgcctctcgggactcagtgttctcagtaaatggggtggtcccccgggccaagatgagaaaaggtttgtgggcaccttggtaagatggaaagcgtttggacatggtattgattcccaaagacactgccattcagtgggcgctcgtgaacaatccaccatctgcctggtttccctgcggggcccagcaagcctcccagcaacaatcttggggatgaatcctccttctccagaggacgtgcctggttccacgcacacaggtgcacgacacacacacaaccttcctttgagcactcgtcggcgttacaacttgggtcctgatcccgtgcactaacataaaactcactcccaaagaaccctagaaggcttcacttccttccctaacatttgagggctgtcagcccttatgttactgctgtcctattaaataccttcatttccccatggaagcttcttcagaagtcacacttcaaaaactagaggagacctactatatatatatatatttttttctcaactaaagtaaaactgatggctccacacacacatgtctgttgaaagaactaacagtgtagaaacagggtaggtgggaaattttcatctcactgttggctgacctgggttacctctagactaacagtccaggctggccccaggctaaccaacctgggctacctctagactagcagtccagactagtcccagactaaccaatctgggctacctctagactaacagtccaggctagtcccagactaaccaacctgggctacctctagactaacagtccagactagtcccagactaaccaacctaaccaacctgggctacctctagactaacagtccaggctagtaccagactaaacaacctgggctacctctagactagcagtccaggctagtctaagactaaccaacatgggctagccccagactaaccaacctgggctagccctagactacctctagactagcagtcctctaggctacctctagactagcagtccaggctagtcccagactaaccaacctgggctagctccagactaaacaacctgggctagctccagactaacaaacctgggctagccccagactaaccaacctgggctactagcctcagactaaccaacctgggctagctccagactaaccaacctgggctagctccgattaaccaacctgggctagccctagactaaccagcctacgctagccctagactaaccaacctgggctagctccagactaacaaacctaggctactagccccagactaaccagcctatgctagccctagactaaccaacttgggctagctccagactaaccaacctaggctactagccccagactaatcaacctgtgctagctccaaactaactaacctgggctagccctagactaactagcctacactagccctagactaaccaacctgggctagccccagactaaccaacctgggctactagccccagactaaccaacctgggctagctccagactaaccaacctgggctagccccagactaaccagcctacgctagccctagactaaccaacctgggctagctccaggctaaccaacctgggctactagccccagactaaccaacctgcgctagctccaaactaaccaacctgggctagccttagactaactagcctacactagccctagactaaccaacctgggctagccccagactaaccaacctgggctagccccagactaaccaacctgggctagctctagactaaccaacctgggctagccccagactaaccaaccggggctagctcgagactaacccacccaggctaaccctagactagcaactgggcctcctccggcccctgctctgggctccgcctgtgaagctgggtcctgggttgccagctgctggcccaggaagattccctggaagattaccttgctttgggagggggtggaaacaccaggggaccccagtgacactggagtcgaaacagcatccattgtcaaaacactggtcactggtgattccagggaagccgcagttcgtcctgttatgggggctcagcctggagcactggcagggggctgtggaaagaccctcagtcggccccaccctggtaccccagaccacactgctccttctctcagaggttctaggggatgcctctactgtcttgttgccacatagagaaacacaaagtcttatcttgcccatatttaagcaatgcggtttcctcctgagaagccgatagggctttgctgaaattgttatattagtttaaaaggaaaaaaaaaaaaaagccaggcatggtggctcatacctataatcccagcactttaggaagccgaggcgggcagattgcttgagctcaggagttcaagaccatcctgggcaacatgtcgaaaccccatctctacaaacaatacaaaaaaaaaaattggccgggcatgatggtccacaactgtggtttcagctactcaggcggctgaggtgggaggatcacttgagcctgggaggcagaggttgcagtgagccaagatcacaccactgcactcctgcctgggcggcaaagccagatcctgtctcggaaaaaaacaaaaacaaaaccctcctagaggagggtgaacagatggacccaaggccaagatccaggcgagaggtgagtgctctgggactccaaggacccttggtgggaatgccctcctggcccgacacggggcccgctgacacctgccgtcactcagcctttccctaggagggaggcccttcttggagccaccctcctgagcagtggcaaatcccatgtgaacaacacacattgccagatgcctttatagccattccccctctcaagttaatttatggttgtgctttttttttttctttaagagaaataaagaaagcacataaaaagaccctctccttcacttacagggtttctcactccccgccagggcacatagccccaggacgaggagcgctgccaggagctgggcgtctcgccgtcccatgtctagctcagctgcaccccagggtggcttgcagaatgcatggtgtccactgccgggtatgttttataatctcccctctgtttgtccaacaagcagagataacctttcttctctgccccgtggccccagcccttccaccgtggaggcgaagaggaggcaagaggcagctgtgccctgtgcaggcgaggcttccgggccagggtgactctctccctgctcggtgatacctcttcctgccctggacagagagttgggtcatgccaggctgccagcgtggaaaaccggccacgtgcaggtctggggctgggcacacacagggtcacacccaggaagggataagctatgcatttctattgatagagtgggcagggaccacaggaatttagaaaatattagggccaagtttactggggaaaatgtacaggccagcagatagcatggaaaagtcccctccctgaggaagggaagcatctcagaggaggtaagagactgctcccagggctgtggttagagcctccccaaccgcagcacgatgccctttgtcccatcttcagcaggaggggctgctctccatggagatgaggctgacagggtcagcggagtagcctgtgacaggcaggttttaataagttcattttcagccaacccctgaaatgggttatttttgttccatgggaatgctctacatcttctgaaagatggcacctgggacccagcccatggccttcctggggtaggatgtgctggagaaggattctgtggacctgacagagaagacagaagccagagagtagacacccggaaagaaagagggaaaagtgtggtgggaaggacagaggggacccgaagttccccacgccagggaaatgacagggggttgccagtctgtttctgatggttgagcagtcaggggcccagagacgcaggaaacccaaaatccttggtccaccacggggctgtcctcagggtctggagagcaggccccatactccaggcccccatcctccaggccctcgtcccccaggctccatcctccaggcccccattctccagggctccatcctctaggcccctgtcctccaggcccccatcctctaggccctcatcctccaggctccatcctccaggctccatcctccaggtttcatccttcaggccatcatcctccaggcccccgtcctccaggcccccatcctccaggccccatcctccaggcccccatctttcaggcccctgtcctccaggctcttgtcctccaggccctcatcctccaggcccctgctcctccagaccctcatcctccagaccctcatcctccaggcccccatctttcaggcccctgtcctccaggccctcttcctccagaccctcgtcctccaggcccctgttcctccagaccctcgtcctccagaccctcattctccaggcccccgtcctccaggctccatcctccagggctcctctgggtccgggtcaagtacctccaggctctctgctgactgttcaccactgggcaaccacagggactcgatccatgaaaactctggcaaggtcagtttccttgttctacatccctgtcactttagtcaccatcatgatataagtgactgagtcattgttttctctcatattcccacccacctctcctctctgcttcctccccatcaactcgacttcccaccgctcactgcagccccttcaggattcctgctgcgaccacctgacccatgcaaaagagaccacttctcagcctctctcactctcctggccctggcggaagcctgtgttgtcataggcatgcttccctggaatcctgctcaggcccccacgcagggacactgagtgcccacagagttgggaaaccattacacgagatgggacgtctgcaatagagtggcatcgctagttgaaagtggagctgttcacaacctccacaactgtacttggtggccacgtccccatcacatgggctcagactgggggctggacattgactttgagccccaagtcttcaccctcatgcaaaaaccatcctccttggagatgcaggctgggaagggcgccatgtccggagtccctgccctgctgtcatctgccgacctttgtgcagcctgtccctttcgttaagaatttcagcactgagttcactgtgttccttgtcatgctaagacttggccacatcccagccatcttcaacatggcggtcgatgtttcatcaaaattcacagtcgctcagattttatttttcctcatctctaggaacttccatctccactccacttctgccacttctgccaccctcccatgaccacactcagaacttgagctccacctctgaaagagggtatgcaaatgtcctttctgcccaggatgtcctaagctcctaacattctccctttgtctgaatcctaaagccctccaatcccctattcccctgtgagccccctcctgtctatccttccttcctgcttctccagcctgatttccacagtgctcacttcacccaccgtcttcctcactgctgtttcccactgtctctgtgcctatgccatctgcctagcatggccgacacctaccttgaattgttgccactctcaacgcatgatctcagcgccatccaggcactcagggctggcgccctcctctttctgtttatccttctccacccctgctcacttccattttgcacactttggggatgatactttccatcagttcacatagaaagtcaacaaatgggaaccacctcagctatcacccatgtggacttccgcttttgactatggagtcactggtaccaggctagcctcccaccatgagtaactctaaaactacataagtaacagtctgcagatgctgagcagcaggcagtgccagacagcgatccctgagagaagggaaacaatagggggagtcccatggctgccttggtttcctggagacgctctccagactacagcacagggaggggaacccaaatagcactgaagtcccatcgggctgaggagacagaggtcagaattggaagcttctgaggcaggcgggttatcaaggtaagagaaggaagctccagaaatataaaagtgtgtcctttgagcttttcatcaaatactatgctgttcgtgcccacaaggccaggctaagtagcccctggggacagaacaatcactggggaggctaaactgaacaactagtgtagggttcgtggggctggaaagcatttgagctcagagcagccagaggtgttgaccacttcaagcattcaataaaggccatgccgtaaaaagaaggctgatctttctagaggaaagctactcaaaatccattcgaacaaaactttaaaacaagtcttgcaggaatcaagttaacctgcaagtaaattaactgcttgtattagttcactcaggttgctgtaacaaaatactacacattgtgtagcttaaccaacagaagtgtactttctcacaattctggtgcccagaagtccaagatagggtgtcagcacatctggtttctactgaggcctctttctgcttgcagatggctttttttccccatatctcacatggtctttcctctgtgcacgcacatctctggcgactcttttcttataaggacaccagtcaaattgaaccagggcccaccctaagagcctcattttaacctgattaccccttttaagacactgtctccaaatgtagtcacattcttaggtaatggaatttaaggcttcatatatgaatttgggggaaataattcaaccgataacactacctgagagagcaaagcattcaacactttactaatgaagacagcaaaacctaaatacacaacataacatccctaacgtctaacagaaaatcagaagttactagatgtgtggagagaactaggaaatatggcccataatcattagaaaaatcagtgaacaaaaacagacttagacatggcataaaatgttcaaagattgaaagaaaaacataatataataaaggaacaaaaaggaatctcagtagataaatggaaactaaaaattaaccaggtacaaattttagaaataaaaaatacaacatctgaaatgaaaaatacactgtatgggtttttgattagatactattagatgctgcagaggaatggtcagtttacttgaagtgaagccagtgcaagataaactatgcgaactagagcataaagtgaaaaagggctaaacaaataaacaagattccaatgaccggtgagacaatgtcaagcaatctaacatacatgtaattgatgtaccagtaggagaggagagaaaaaaatcttttaaagaaatacttgatcaagaatgagtattgagtaaatattcattagatttttctgaagttggtgaaaagtataaacctacaaatcttagaggctcaaagaacttcaaggaagataaataccaaaaatatcacatcaaggcacagcatgattcgtctgttgaaaatccggtgatttaaaaaactcttaaagcagctggaggaaaagacttctataatttgaatgtccctccaaactcatgtcgaaacttaatccccaatgtggccgtattgagaggtggggcctttaacaggtgattggatcgtgagagctctgctctcatgaatgaattaatccactcatgaattaatggattcatgggatgatggattcatgggttattgtggaaggggacctggtggctttataagaagagagacctgtgctaggacatgaacacactcagcgccctcaccatggaataccctgggctgccttgggacacatctgagagtccccaccagcaagaaggcgctcaagagatacaacccctcaaccttggacatcccagtctccagaactgtaagagatgaagttcatttcttataaatgaccagtttcaacttagcaacagaaaataggctaagacaaagacatacagcatggaggagaacataataacaataatgactgataacacagtattatttactcaacactcattcttgatcaagtatttctttttatctgataatgcaaaccagaagacaatgggataacatgtgtaagtgctagggaaaagttctatactctgaaaatatgctttcagaacaattgcagagttgattcattgtgacaaagactgtaaggcctccaaaacctacaatatttactatctagccgtttaaaaaaatccaggctggttgcagtggctcacgccacaatcccagcacttagggaggcctaggtgggcagatcacctgaggtcaggaacagcctggccaacatggtgaaattccatctctactaaaaatacaataattagtcaggcatggtagctcatgcttgcaatcccagctacttaggaggctgaagcagaagaatcacttgaactcaggagaggttgcacatacccctatattgtagccttaagctgtctaaaaataaaatttaaaaataacaatggagggaaatatttgtattctatttttcttaagaaaatgttacagaaatgagccttgtgagccttaatcctttttcctccctctataatcttgtcctgaaattaagatatttagtatactggttgttgggagacagttctccataaagttctcacatttctgcacatcctgtgaataagaaactaactatccttatggcataagacctaaacttaaggcacaatattaagtactgccttgacatctggtgaaacagagagggcctcaagcagcctcaccgaaagttcccctcccatctctactcgtggataaggtcccctagccaaacaaccctccctgtcaagggatcaggcaccgtgcttgcttatccgtgagtagcagatttcagttttctgccagcccacagaattatttaaacaagccaattgcatcctcctgggagaaccactagccactacgccctcttgatactacaaagcctgctttccgcagcctttgcttattcactctgctcctgaatgccacctctgtgtggctccacatggcacagtgtcctcagcccctgagctataaggatatgggactcacaaactgctattgttctcacctatgttgtgttggggatggcgtgttcagtcatcccatcatcctagggtgaaatccctccctcactaacgaaatgcatgggaggcaattaaaacagttctttcttccagactatctctccaaggatgtttgggtcacaaacaatcttggaaagtggataaagtgtctccctctgaagcaaagagcaggcaagctcactgtcccttataaaacacttggatccctaagtccagggcttctctcctataaggcaacccactgtgtgtgcaggcacccatctgagcccattcctggtcccagtcccttgggggtcttggaggcaaagagaaccaacacaagtaacctttcttcatgctgcttgctgtagcatgagtaataaagtcatttatctttgaaccaggaatctcctgtcttctgctagcaaacaggaaactggcagactcacctgctggcttgcacgtaggatataataagctcagcccttcccacttctcgacactgatagactagatcagatgaaatgtagaaaatccttccaatacttgcctttagcttcactgagtccccttgtagcacgtgcatgtgtgggcatgtatggtttggtctaatttagtctgtttgctacctcaaaaatgtccagctcagggcactgttaagagctgaaaagaacaagtcagaaatcctttaaaaataatactatttattcttgtgttaccaactggtgtcttctgtctacttggacctttaagtcagggaaccccttcttcctaatggccatcccttccttctggtaagttacaaggactgggatttgccaggtgtgtgtctctttcttatgagctgatgtttcctatcagactcataaaaattaaatattgcaacaaaccacccctccctctacttgcaaagaaaggtgagggagttttcttaagttaacgatatctttcccagtgaccctacaaatatgaacttaagccacagcttgccttcgagaattagttcctggtctgacctttagttcaataaatgccctgaacagaaccctgttgtgtaggaaattatctagaagcaactgtggcctccgagtacatagccagtggcagaacagaggtgtgcatagaccaaattaaggtgtgaaacctgctatttattaaatcgattgacagcacgtagtgaaaaatgaagggaaagagaaggtgaacacctcatacaggtgtgggagggtagaaggaccacatgcctgaattctggccacgaggaactcacgcatcctctccgtctctccaccttctccaccagggtcatagtaatggacatctcagctggggaccaggaggtggagggagcctggggctaacacatgctcttgctttgtctaagagattctgggggagggcttgtgagctcagctgcagccccgcacgatccacagagcagcccatgtttactgcgcatttccggggccaagcgcagggtgggtggtcaccgtgagctgctggttcagggctgaaggagttgtcagcctagagcacaccatcggttccctgtgatgcggccttctcatccttttctctccctaatgacgttcttgttggttccatccttctcatcacacagcatatctcacagaagaccactctttcactgtccaccttgaatactccttatgaatgtgtgcccccatatgcacctgacatacctccagtttcccaaaatccactttgttttcttgcctcccacagcagaattgccttatctcacacagtggtgacagcactctgtaataatctgcatgggccagggctccttggttgcaggtaacagataccactgttacggcccaactctgttcttctatgttgaagccggaacccccagcgcctcagaatgggatcacatctggagaaggcgcctttaaagaggtgattaaaattgtgaaatcaagtttagcctaaagcttcccccttacatattttaaatttggactaaaggtttctctgtacatcgtgaactgtaacaggtggaggcgtaaaccgaccgtagcctacacttgtgccaatcaccgagttctgaccaatcaaatgcagccaactgtccgaactgaggtgccagtcaccgagttctgaccaatcaaatgcagccaacagtccgaactgcgttcaagtgaggcaaaggcggagctgtaaccagtcgggctgtttttgtgcctcatatccattttctgtgcctcactttcctgtctctgtccataaatctgcttccaccccgtgactgtgctggagtctaagcctactctgactcagcaggctacccgattcgtgaatagttctttgctcaattaaacttctttaaatgtaattcagctgaagtttttcttttcttttcttttcttttcttttctttttttttcttttcttttcttttctttttttttttgagagggagtttcactcttgttgcccaggctggagtgcagtggcacaatctcagctcacgacaacctccgcttcccgggttcaagcaattctcctgcctcagtctccgagtagctgggattatgggaatgtgccaccacacgcgggaaattttgtatttttagtagatggggtttctccatgttggtcaggcaggtctcgaactcctgacctcaggtgatctgcccgcctcagcctcccaaagtgctgggattacaggcatgagccaccacgtctgcccaagtttttcttttatcaagttaaaatggggttgttagggtgggccctaatccgacctgactggtgtccttatgagaagaggacatttggacacacagaccccagacacacagacagacaagcatgggaagaggcagcacaagggtgctgcttgcaagccaaggagcagcttacaagaaaagtgtaaactgacatgtaactccattgagcagatctgaagtggaagggtgctttttatttttttttttaagacagtgtctcactctgtcgcccaggctggagtgcagtagcacagtctcgactcactgcagcctccacctcctgggctcaagaaatccttccacttcagcctccctagtaactgggactacaggcatgtaccacacactcagcgagtttttgtatttttagtagaaacagagttttgccctgttgcccaggctccactgagtggaggcccagggaaaccacaggaaggcagtgacccaccttgttaactggctctgcctacagtccttggtgagagcggttgttcctggccatcgtggctgggccataggctcactgctctgtggtagatggaagatatgggccttggtaatatactgaaatgccacaggaaaccaaaccagaagtgatttaacccacaagcacacttaggtttatttaacatgatgtctcaaggtgggtggggggctcaaatcagtagctcagggttattaaggctctaggtcttgggccttacctcattattacataatggctgcctgcaacaccacatcacacccaccttccacaacacccaaaggcaggctgcaagggctggcctaggaagccagagggcgctcttcattcatcaagggagaagcctgccccaccttcaaggagatgccccctatgtctcatgggccacatagaattgcacggccacttctggctaaaagaggggctgggaaagtgaattctttctcccccttccttcgtagagtgcaagttaggtaagaaagaacggatggtggacagccaggaaacagtcagctacgagatgttgtgtggaaagcccacctttctgacactggagaactgtgggaagaacggacaggccacacaccagctgggctctgagaacccccagcttctgctccacagtgagccagcaggaatccaaagggcatgggcagaccccaggggctccttcaccccacccaggggtagagagggcaagacggagtagagcgaggtaagagactgagcaatgcgttcccaaagactgtgactgacagaagctgtgcaaattattatgacaaactgaattttaagaggaattggactaaataaagttagctcatttttacctgtaattagcagacagagagtgtaagatcagacataccatagatggaaaagaaaagctaaaacttccttgcacatctgagaggtaagaggaggtgtctgtggcccccctgacacatacgtgacatatgtattattacggctcatgtgtgtgctgctgtgtgcagggggcagggggcttcccgttcctgatggttcttcttggtgggtgtctcccggcctctcaggcctctttatctgctgaacgtggtagccaagggtttgggaatgatttgccagactggttaatgtggaaagagctggccccgctcagttctgcacctccctcttcctccctggaaccgtctggctgcagagagcaggagctttccagagctcccgggggatcccatctccagtataactgtgcaacgtgtgcccagcacaagagcaccagatggagggacaggtgggaggaggaggaacccagggtgcatttagcttggggcttgctgagctgaggtccccagagcaaggacgactaggttggggggacaccctctcccaatccttgccaagctacagaggggccagtgggaataaagtgacattttggcttctgtatccctcctctgctgttctattttctagttcgttcagatctgaggttggggaggggttttcctggaggggtcagtccatgccaccctctgcaatttttattacacatgctttcagacattctgctacaggtttcatctcctacgccaatttctatttgggaaagcaaataaacggaaagctaacttgtgtcacttggtcgctggggcatccgcagtgagtagttaagaaatgccaggggagtcggtgtccattttcatgcctggacaagagtgcgtcttggacttgcgtcctgctgcacaccccaccgtcccgctgcacaccccaccgtcctactgcacaccccactgtcctactgtacaccccaccgtcctactgcacaccccactgtcctactgcacaccccactgtcctactgtacaccccaccatccctgctttctgcactcagctgcccacttgtatcccagctcaggaagcccagaagatgcagaacctctgcgagagcccagggtgaaacgctgcgcttcactttcaaagaaaggaaaatcattcatattctttaaaagaatgaacagcacagattaatatcgatctcttttaatttttaggccaattttgagtagtcaaagtcagagcagtcaatctgtgttgtgagccgaggcacagctgcagaagcgtgtctgaggtgtccggtggaggtggcagccgagctctgggactaatcaccgtgctggggacggcaccgcgtcaggatgcaggcagatccctgcagaagtgtctaaaattcacactcctctacaggggtgagggggagggagaaagagatgctttagtgaggataaacattttctttcacatttaaacaattacagagtttttactttaaagtatccataggcacattctttagaaaacatgaactgtcagccgggcacggtggctcacgcctgtaatcccagctctctgggaggctgaggcgggcagatcacctgaggtcaagagttcaagaccggtctggccaacatggtgaaaccccgtctatactaaaaatacaaaaaaaatttagctgggcgtagtggcacacacctgtaatctcagctactaggaagctgaggttgaactcaggaggcagagattgcagtgagccaagatcgcaccattgcactccagctcaggggcaacggagcgagactccatttcaaaaaaaaaaaaaaaaaaagaatacatgaaatgtcttcagatttcgtcatgccttccccctctatcctaggcaagctagaaagcgttaccaacagtggctcttcccaggcttttggttagagatgtgaagagaagccggggggaaatcaggtttcttcccaagtcccttagccctgcctttctattcctggacctgaatgcagcctgactcaggctaccccattgcaccaccactggcggccgtgactctgtgtaaaggcatagctggtgatgctgatcagagcctctgtagtcttaaatgacttttctaactaattctaaatcttcagaacccatcgtataaaaaggccataccttctggagggacgtcgatggtattaggatagaagcaccaggggaccccacgaacggtgtcgtcgaaacagcagcccttatttgcacactgggagggcgtgacaccaggaaaaccacaattctgtctttcacggggggccactgtacacgtctctgaaagtgcacaggtaagaagcaaagtaagttgtgggctgaattccttgatgttatcatgcacacacccatccagcttccttctccaatgacatcagcaactgtccagtgaggcggatataaaaccctcaggacatgagagggagacgtggtcctcacatcctgatgtgcaaacattacgctcagggaaaatgcaaggtgccccaggtttgtggactttgcatctttctaggtaacttatttattcactttttaatttcaacaaatgattattaaattttactcaatacataaatatttactgagcaccatttgtgtgcatgagaagtgggagctagcatggcaaaagccaggcactgtgccaggtgagagagacccagaaattaaaaccagagaagtcattaataagagtctaaatatctgggcccaggctcatgcctgtaatcccagcactttgggaggctgaaggaggtgaatcacttgaggtcaggagttcaagaccagcctgaccaaaatggtgaagccccatctctactaaaaatacaaaaaattaggcgggcattgtggcacacgtctgtaatcccagctacttgggaggctgaggcaggagaatcacttgaacccaggaggcagaggttgtagtgagccaagatcgcaccattgcactccagcctgagtgacagagcaagactccatctcaaaaaaaaaaaaaaaagagtctaaggatctgatggaggagaaaggcaagaacatgtgcgagacaacgcaaggccatcgtcccagggtgcccagggtaaccacgggggtagggcactccccggagaggccaatgacaagcaggttgaacaaagcaggggggctccctgcaggaggaggttcaccaggtgaagatggagccgcatgggcaaaggccattccagagacccaggtgtgttcaggaggtggaaacccattgcaggtaaggtgagaggaccgggtggggtggtctaggaggagccgacagagggtacaagctgtgaaacagcttgaagcagggcagtgaggaaagggatctagaggaggaagacacgtggacagatggggctggctgggggctgccgcaggatcttatgcaagaggttctaacaccagagcttcaggctctgagctccgcggaatcaaaggtctcagaaagcaacctattaggatctggtggttgacagcctgcagcagggggtgaaagaggagcccagagcaccctccggtccctgtccctgccttggggcataggaggggaggaactcagtctggccacactggctcaggtgagggcgccccaggggaggccgagaggggctgttctcttgtctgctttgctatcagggactgcctcgagatgtctttggagaaagtgttcctggcttgctgggaaggatccgtgttcagctcccgctgcccagcagcttccatgggaaccttgccctcctggggtctggatccatcgcgacgtgaaggtgatcatcgcccacccccgggacactgtgggggtcaagagaggccccgtggtgagggaggatcatcatcctgggggtcgggggggtttcctcctcagggaggaagatttccagccccggtgctctgcctccggcagactctgtcttgcccacccgctttgtctttgtcgcatgatggaaataaatggaaatggtttccacacacgaatgcactaaactgtaatcacaattttctagatttcagttgtaacaggatcatggacctgagtgacccgcaaagacgctctgagccttgagccagagggtgtgtggggtggggaggggagtttgccacggcctctgtgatcccacagcacagggggcagagctgggggctggggtgggggcaagggcgcaggcagatgggcctgggggtggccagcacggggacccacccagttcgttctgtacaccgaggccacttcctctctcgggttccaaagctcccccgctccctgccatgggcttgggggtcttcccactgcagcccaatgctggctgctcttctacgctgcccaagcccacccctcaggcccggtaccccacagcagagatcaagaggtggctggagggcagtgggggcacggacagcaccactgggcgctccctcttcaggcctctctggaaacccttgctttggaaacgtagaaagccctttctcctgcccccaccttgaaactgtacctaataacggcaaataagttattcagctccccacagctggcaaagtgcaagtcgcagatgctgccacacagcatttcctgacagccctagggcagaccgttgatccattctgcaggtaaaggagttgagatgcaaacacttcccaaggaagcaagaatggcctcctcctccactccctagaaggacccagggcaaccgatccacttgacaacaccagggaatatgggttgccagccacgcactcatgagagaggtggctttgactcccagagcatggatcccaggggagcccaggaacctgtaggagagggtctcccagttggccaccactgggacgggcattcgggcctgtgggagagggtctcccaggtggccatcactgggaccggcatttgggcctatctggatgggccttgggagggtctgcccctgggggagatgttggcatgaacagtcaaaagcactattctgagaccccacgccaacacttcctctttgaaacatgacacttgggaggattgtatagtcttcctaacacaggaaaacagccccgactgaaggcagccccctcctcgtcgcacttctcgaaggtctccgggggccctgccaccctgagttactctccacctgcttttgccgatcctgtaaattggatatacttttaagggcctagaacagcacctggcacaaaacaggtgctcaaaaatatgtatgtaaaacagtggctcctggcggaggctgccagagctggctgtggccccacagagcaggaagaagcacgccttacctgtctgggcctcggccagggtgccgagggccagcatggacaccaggaccagggcgcagatcaccttgttctccatggtggccattgcctcctctctgctccaaaggcgaccccgagtcagggatgagaggccgcccgagccccggattttatagggcaggctctgtttgcttaaagagcgttagataacatttgcctaaggaggcccggggatcctctgagacaataatctccactgatttttatcaaaggtgtttcctagacatggtcaagctacatggaaggatttgctgatagacagagacgacatgtggtgaggtcatcttggctgagggatctgagattcagaaagtccctctttcccatgggagtctcctccaacctgaccttaatccaggtcctactcatatctgagaggccctcccgccagggtaaatactgtactcactgcagaagtgattcatagtgagagatggccggaaaaaggcttggccgtgacaacagtggctcacggggtggccaccgtgaccttgcagggggaagggaaggagctcatgaagcccattccgtctaggcctaagctaattcttttacagtggaattgttttaataatgaaattgtaggcctggcgcagtggctcacgcctgtaatcccaacactttgggaggccaaagcaggcggatcacttaaagtcaggagtttgagactagcctggccaacatggcgaaaccccgtctctacaaaaaaaaaaaatacaaaaattagccaggcatggtggcgggtgcctgtaatcctagctactctggaggttaagtcaggagaatcacttgaacctgggaggcggaggttgcagtgagtcgagatcaccctactgcactccagcctgagcgacagattaagtctccttctgggaggggctgggggcaggagggagaaaaaaatagtatatacgagctgccatcaaaaactgacaaagtgaacgtggttcactcccctgtgtctatggggctccctccctccccctcccacaccttcccagttggtcccctggactcctgtattttagaggacagcctcctgctctcctgtaccatgcctcactcccctcccctgctcggagctttctctttcatagctcttattacctcctggtggataaaacaagtgactgacacattatgttggttatttattcattgcactcctccctgcagcagacgggagggcgcatgggagcagaagtcctcatctcctagtgccttgaggtggccccagaccctagaacagtggctttgattggcattcgagaaacagctgttgaagagctgcatgaagaaatggacaacaggagaaatcttttcttcttcagtgagaaattaggccctgaggaaaatgcatgctagcctaacaaaggtactatcttttcttgggtgacctagtcagtacatttctgcagcccctctgggaggggagcctgggccagaatgggggcggccatgttcctcttcgctccatcccaggacccagcccctcctccagggctgccactcctgcaccggggtctccactcctgggccagggtctccaggaggggcctgaccgcaggacccagggaggggccgaggcctggtgtcctctgtggtcagcttaagtttattgaaaacaggacgggggcaccaggcccagggtggtgctcatagtgacggtggttttcgctgctctaatttctcggatcaaaatgggggctcttggaaatgggatgtaaattgcacaatcatttggagaaaaggtgggcagtgttcggtgaggtttaagccatacagattttacagctcagcaaattcttctgtttccaggcctggtctcttaatcccagaaacatgttcatacttgggcagaagaaaacacaggcaaagatattctttttagcattgtttgtaacagctggaaacagggaaagaaggaaggaaggaaaggagggaaagaaaagcaaaataaatattcattaaccagggaaagggaaaatgaacttaaaatacaatgcagtcgtcccttagtacccctgggggactggtttcaggaccccccacccagggatgccaaaatccacaaatgctcaagtccctggtataaaatgacatagtgcgcagaaaccacgtgcatcctctcctacactttaaccatctctaggttagttataatacctgatgcaatacctacacctcatttcattctgcagattctacatagtacttgacttgcggcacacccaagttttgatctttaagatgttgtaaataagattttaaaatactttttttttttgagacagagtcttgctctgtcgcccaggctggagtgcggtggcatgatctcagcttactgcaacctccacctcccaggtttaagtgattctcctgcctcagcctcctgagtagctgggattacaggcatgtgccaccacgcccagctaatttttgtgtttttagtagagacagggcttcaccatgttggccaggctggtctcgaactcctgacctcaggtgatgcacccgcctcagcctcccaaagtgctgggattacaagtgtgagccactgtgcccagctggattttaaaacagttttgatctgacattactggaatccatggatgtagaacccatgaatatagagaactaattgcatacatgtattatactttacatatattatatatgtatgtatgtgagtatctttcagaagatgaaaatgaataaataatgagaaatattgaaaacaaagcgaagtgaaaaaatccgttaaaatggtttgtaaagtaggatatcatttataatgtagatttccaaactatgtgaaacaatgtgatatactgttggaactgcatccagatgaacaaaatgatgacagtgtagacaggaacgagacactgacttcagcatgatgggtctgtctaggaaggaggaagcaggaaaaggtggcggggtagggcgcaaaggggccttcgatgtctccgtaatgttttcttttgttgaagaaaatctgagggaaataaggtaaaaaggttagcatccattaatgaggggcagcgtagattcacggatgttgttctagcattctgtacatgtttgcaattgctttcttggaaagcccagctcctatctccttgggagagctgtgagataactaccaagtgccggagtttggcctcccacattagggttggagcggctggagctgcccccgggactctccgtttctcgggacaagagctttatccctgtgagagtgggcggaacccaagaccacaccatacataaccttatccataaaaacttgttgaagacaattccagtgtggcgagggagagaatgcagaggcaagcgccagtccatcatcagtgggggaccctgtgccagcattttcacagctctgggtcttagttttcttatctgaaagacgcagtggctgggccacaggacatctgaagactccgcacctcagaccctctccggcaggcatctatggccgtgggggcgtctgtggctgtgcaggcattgcttgtttcctgcgcccagccgacctccctgcggtctggcgagagcccctcattttcagtggggggccccgcagccgcccagattccccacaagggggacgcgcagttggggagtcagtctcctcctgacgctccccacctgcccgctgcccctgacctgtgccttggcaggagggggttctgtaggtggccctggagggagggaggagtttgggaggaagtggatccgggctctcctccaggatccctcctgggatcacctgggacaggccacgtccccctctcagccacagcccaggtgggcgtcctctccacacaccatcttccccaggccccagagcagacccctcacccccctgccccagcctggggggtttaccagccgcaaggagacttttacagtcttcactctcctcgcattgcccagatccgctgtggtgaagcccgtttcctgccaggcctctggtcaaaaaagcaactgccaccccagggaccctttacaaggacacccagctgaggccctggggttggggtcctcaggtattggaggaggcaggtactttcctggccagggaacttgaggcacagacccacagcatggagcgggaccacattcctcaaattaacccagaaggagaggggaatgattggagtgtgaggccaggctcctccagggagagtggctgaggcgctatgcttccatggtgacagtagggcggtaacctcgtcaggttagccagcttcttccagagccacacacacccagaaagggaagaggagatccaggactgagcatggacgcaggacgatcagaaaggcgtccttggtggtacaccctccagacaccatccactccctccggacaccgctcacaccctccagccaccgccaactccttctggccaccaatcacaccctccggtcactgctcagtccctccagtcagggatcactccctccaacgaccactcacaccctccagccactgctcacacactacagccaccactccaaccctccgttcaggtcttacatcctgtggccactgctcattccctccagtcaccacccacaccctccagccactgcccacaccctccagccaccgctcaaaccctccgtccaggtcccatatctgatcactgctcactccctccggccacagcccacacccttcagccaccactcacaccctctggccaccactcactccctcaagccaccgcttactccctctgaccacccctcacaccatctggccattgctcacaccttcctgccactggccactccctccagccagagctcactccctccggccacacccttcgggtgccactcaaaacctccggccatggctcacaccgtccagccaccgctcataccatccagtcaccacttatgctctctggccaccgtgcactccctctgaccaccactcacactctccggccactgctcacacactactgccaccactgagaccctccatccaggtctcacaccctccagccaccactcacttcctccggacaccactcacacactgtggccaccactcagaccctccatccaggtctcacaccctccggccactgctaactccctctgtacagggctcactccctccggccaccactcacaccctctggccaccactcactccctccggccaccgctcactccctccggccactgctcactccctccggccaccgctcacacccactactttgcctggccttgctctacttttgagttctgtgtatgacacgagctgatgctgatctgctgagcaacctgttccgacagaagaatgccaagtccacaacgcacacaggagagatgacagtaatggagcccctggaattcagtggatgattttgattcacgtcaccagtccacgcagacacgccagacaatgagggaaggaaacatattatttggaatcaaaggacaataatacgtcaagcaccaaatgctacaaagaaatcatgaaaataggccttaaacgagtcattcctagattaacctccccacatgtgaaaataagtcttggaagtagaaagggtgggtttggttctggtccctagagatgaaaacgtgcagtgactgcagttctgcacttctgggctggtgcgtcttttctgagtggctgttggtggctttgcacgtgaggtcacataactgcttatctcgtcaggaattttgcaagacccctggagagaaaaccagatggaccagtgggaaaggccgcccttgcaagttgctgcttcttttgttcttagtgaagatcagaaaggagcgtgaggctaggcgtggtggcccatgcctgtaatcccagcactgtgggaggctgaagcaggcacatcatttgaggtcaggggtttgagagcagcctggccaacatggtgaaaccctgtctctactaaaaatacaaaaattagttgggtgtggtggcgggcacctgtggtcccagctactggggaagctgaggcaagagaatcgcttgaaccagggaagcggaggctgcagtgagcagggatttcgccactgcactccagcctgggcaacagagcgagactccatctcaaaaaaacaaaaaacaaaaagcagcttgaaggttgtgctggaatcagatggaagggtgcctctttcgggcctgctactggtgccggaactcagagctccaagggtgtctgctcgtgtgcaggttcctacacgggagtccaggggaggatcgggctgtcttcatcacctcaggaactcaggtggctacttgtccccttcctcttcaggtttttaggtctctctataaatgaaaacaaaggcgttattgtttttagcacttccagccatccgtccaacatgatgacggagcgggcacctgcattttgccctgtgggaattgtggggctgttctccacgatgaagacaaggttggcctccccctggggctgccagctctgagtggatcccaggcaggcatgaaaagctccaaccagcaatgcatccgcaggtcccatctccgccctgcgacagttccgtcacttccgtaggaaacttccaggtctcggcactatgttcctgagttctggtttgagtcacaacaattttgttttaaacccccaactagatagagaaaagtgctggatgaaaatgaagatgaggccatgggcatgccaccaactagcacacgggacacttccccgcaagacagtgagtcttccaaaggccctcacgttgactttcctcacaatggacaactgaaacgcacagcgggcctgctggaaagcctcccaggaaaggaagtctcttctgggtctcccctaggacgtctgaagagggacttgggaaagggcgtgtctgaggctgcgcatctctcgcatgcactggtgggttggaggcagcggatgactaaggcgttgtgcagggagcaggggccccaggcatcgccggagccagcgtcacagacgagctcctccaccacagcttcaccacaacaggggaaactgcctccaagaccctcccagggtttctcagtgtgccctgaagcccccatgcaacacattcaccagggtcttcaccccagacctcccaatcagactccagataaacgccctgcaatcttcacatttaacaaacatcctgagagaggcttctgcacccctaagtttgagatctgttgattctgctgtgcagtcacactggggccacgtcggggatctgatgtgaggcacactctgcccttgttagctgggggggcctcatgcaggtcgtctccgctgtagtacagggagggtcacaggctctgtggcccaggacggtgctgacatgggaggggctgaggtggccccgtcatggaaccgttgtgagcgggctccccagactgattttgaacgtttgtctccagctcacccacgacagctggaagacacggcggtgggcttctctgccttgcgccttcagtgtcttaagggggacttttaggatcaccagctcagtgctcagcccctggggatctgtgtcccgtgaaggcctccatgtactgcagacccgtgtggaggaccggcttctcctttcctgccctttgccctctgtgcccacgcgacccttctgtgccccccaggctcccacagcaccctgaacagtgaggaggtctcccattcagttgtccatcctggtcctttctacagtgcgggcgggctgggctgagctttatactgaagagcatagcaggccactcagtgcctagtatggggccaggctgcctctcccagcaaggtgagcaggagcaagcactttccacccagcccgagcacagccctcaccacgccccgagggggtgctcagggctgcagggcggcagtgctggaggtgaagctagcccaggtctcagtcccaggcctcaccctgtgcccgtgggcaccattctttagtttctcatttaaagcacaaaatcagtgagagcaaaacgggaattaacgcctgaggcacattcagcatttgatgtcctttcttggccaattgtttcaaattaaatgagctttttaaaaaggtctttgagccttggagacagaaagctgactggtgggtgccagaggctggggagaaaagtggagtggggagtaactgcgtgcttctagggtgccgcgtgtcttttgggagatgagaatgctgggaactgacaaaggtggtgtctgcacagccctgtgaatgtgctgatgctacagggttgttcactttaaaatggtgaattgtatgttatataaatttcacttgaattagggaaaaaaaacgtacttactttgacgtcattgttagttcttggaaactacgactttaagcaaaatgatatataatgaaaccaattttttttttctcatcgactttataacaaaattacattgcaagcaaggacgttgctggagggcctgtgcgcactgtttctcctaaagctgcagtttctaagatcccatcaaccgtattaagtgaggacctcctgtgtttgaaaccatcccaaggagagacttcatctgagatcaagccagcaaatgtttccccggcgcccacatgagaaaggcgccgtgttcacctgccagcacgcagctgccagggtcccagcgaagccctaagcctccttcttcctcctccaccgtctcaggtttcccctccatgcccgggtcctgccaagccagcctcgctgttgggtgcccccctgcaggcccctcccacttccacgcctccccctccgggaccccccacccccccacaccaccaatgcagagctccccaagcctctcctgactgctgcctctcatccctggctcccagcgaggttccagcccctcagcaggcaggcaaggtcctctcccgcactgtctcagccccccgccccctcccactttctccctgctcctggcacacggggcacgcccgacccatccccatcccagcaggggctcctcctcgctgcctcctcctttcccatgtcgtgaggctccttcttcctcccgggccccagctcctctgcctgccaggctgcacccacccagagctgcccaggactagctgtgatctctgttttcagcacaagcgtctgacaccctggagccaccaagtcactgctgctgaattgacaaccactgggtcacgccctggtttttatagcaagaccagggttgcatttaagggaccttagggtcaaaagccagggacaacgtgagctggggagggcgccgcacccacctccatctgctcgtggatccagtccaggaaggaggtgacacgggtgtacaccccaggcttgttcacctctgcgcagccgatgccaaagctggtcgctcccactaacttccacagcctcctctcttgacacaccaggggccccccgctgtccccctgggtgacaggaaagaagcaaagattgggggacagtcaccgccatgcgagattgctttctgtggacagtctgccgtgtgaggctgcttgctatggagttgggaccccccttcatgatgtcccaatggatgacccaggttacagaagggaacccaccagcccttccagacacagcatccccaagggaggatgtccctcggcccctttggggtgctgcctccagctgtgtgtcccttccagaatgcagaccctgaccctctgaagctcaagggcagctggtgagagggagggtccacctggccagggccctcaggtgacctgtgatccacctagtagaactggagtcccagccactgcagctttcggagggccagattcactggttccccgccacctgcctccccaccacctgcctcccctgtggtcccccacaaagtcagaattggaggggagcagcatgagtcccctcccaccacccagcacccacgcagagccagatcactgggtaaacacagggctggcagccaggaaaaggagtgatatcttgagcaaatttcttctccacgccctgtaaatttactttttgtcctgtcacagggaaacgctggcaacgacctgtcccaagggctgggtcaccctgccacggcctcgcccaccgctgcggccccgtacctggcagctgtccacgccacccgtcaggtagcccgcgcagagcatggagggggagatgatgccaccgtacacgtccctgtggttgcagatcttgttggaaatcaaagggacggccgcgtggttcaggacaggggaggcgtcacctgcttcaaagtgagtgaggggatgtgtgtgagaaggaagcccggcccaaaacacagaaggcgcatgctgagaccaggggggtgagggaacgagggacgagggggatgctctctggtgtgtcgcaacagcggaaaaggacagggccctgcgggtgggacgagcagactcccactgtctcgaagcacctcaagcccgagcttgccctcctacgagtggccgcaaggggccagtctgcttcaaggcagggccaccgactcccctaaggtgtccaaagaggaggaggagtaggggcaacagtggccaagacacctccccagggcaccagcccaatcagccatcagaacaccccaggttatgggagggaaactgaggctcaggagggtcactcactcagcgtctttgtgaactctgggatggtcagcagaaaaatgaccccaaagacattctcaccccaatccccagaacctgtgactgtgtcaccttacagggcaaatgggacattgcaggtgcattgagggacaggccttgagtggggagatgatcccaagtaagagggtggacctgacgaagtcacaggggtctttggaggagccggaggagaagctgtgacgacagagcagggaccagagtcagagagtcagagagagattcgaagatgcggcattgctgccccggaagaccaaggaggggcacgagccaagcagtgtgggcagagtgcagacgctgggaaaggcaggagacagattccccaagggcctccaggaggagccagcacagcccacacttgacgccagcgccctgagactgagtttggacctgtgaccttcctaactatgagatgatacctttctgtcattttaagccacgaatttggggtcgtttgttgcaacagtcacaggagacttaatccacgtgcagtgggccaagcacgcccccgacaccgagggatggacccctccaactcagctggtttgtgacccaggcatcttggtgttttaaagactccatagattccatggagacaacaaaatcacacaatgacaggaccctgaggggctgctctgaggagcacatggtatcacaagacactcagcttcctgcccggaacgtggcgaaacagctcaatgcattatgggagaagattccaggacaggctggagctgaagctacatcaggacaggggctcgtcggaccttttgcactggacagagcagattgacagcgagaagaaaatcggcagcgggatggagaatctcctgggaggatgaagctgttgcacagcctcctcttcagagcccagtgtcatcagaatgactctggtgggctggttggtccggaatgagagcccaccatgagaggaaggggagcgtagattggtgtcccagctcccaccacacaccaggggtgctggttctgatgaagctagaaaggccctggaccagccacactggcacagaactgggcctgggccatgtgggtgggttggaaactacagagagctgtgagtgccctcggccaggtgggcagcactgccagtgggtggggggtaagtaggcccacagactcgaagcatccgggttagctcctgggtgccttcagctgggggtgggctcaagtaattggtgttgagtggaaaacactgaaattcctgtgttaggttgaactgtgggcccctccaaaatatgcctacctgccactatggagcccaaccttatttggaacagggtctttgcagatgtaattaaggtaagaatctcaacataagatctcccagcgtttagggtggaccctaaatccaacgacttgctgtccttataagacacaggagagggaagtttgagatacagagacacagggggcaaagccacgggaggaaggaggctgaggctggagatccagctacaagcccaggaatgccagtgcagctgcagccgccgccaccagaacccaaaggaaaggggtcagagcctccaggaaaaccaccctacagacacctcaactgcgtgtggaaataaatctccactttttttttgttttgttttgtttttttaaacgcaaagtctcactctgtcacccaggatggagtatgatggcatgatcacggctcactgcagcttagaattcctgggctcaagcaatcccaccccagcctcctgagtagctgggaccaccatgtcaggctaatttttgtttgtttgtttgtttgtttgtttgttttgagatggagccttgctctgtcacccaagctggagtggagtggcatgatctcggctcactgcaacctccgcctcctaggttcaagtgattctacagcctcagtctcctgaatagctgggattacaggtgtgcgccaccatgcctggctaatttttgtatttttagtagagacagggtctcaccacattggccaagctggtctcaaactcctgaacctcaaatggtccacttgcctcggcctcccaaagtgctgggattacaggcatgaaccactgcacccggcccaggctaatttttttaattttttgtagagacagggtcttgccatgttgcccaggctggtctcaaactcctgggctcaagcaatcctcctgccttggcctcccaaagtgctgggattacaggtgcatgccaccatgcctggctaatttttgtattttttgtagagacggtgtctctctatgttgcccaggctggtctcaaactaatggcctcaagggatcccatagactcggcctcccaaaatgctgggactacaggtgtgagggaacacacctggccaatttccatcgttttaagccacgcagactgtgataatttgtcacggcagccacggaaaatgaatcctcttcctactaacaaagaaagtgattgatggaaaaacctaagactcatgaccagctctgtacccacactaaggaaagggtggcccgggcttcatttgcatggactatggttactgccactcctacttcccttattattacagcgatctcatctgctgctgcttccacttgctctttgtaggatgaaagaacacatcttccaaagtcccacaagacaaagagtcttcacaaatacgaatctttgagttctgaatgaagcctgggagggttgtctaggtgggctctgtatgtcctcagttaacaaggccgggggtccgggcagggaaagggaaacacctgctgtgttcgagaaggtctaactctctcctgagaaggtctgcagggtcatgttgtccccataacaatggaaccgtgactcctgacccacagttccttggctgactgtgtcccgagcagctgacatgcactccctggccggggtatctgggcagcccatgggaacatcacaatgggacattgggggagccccctccgcagccctctgggttctgagcccctggactccgaatcttggcttcagcccactgacctccatcctctgtggccccccatcctgacgtccagcacacttttccatcggggaagttctcttcagagttgggcaggcacacaggctggatcatttctgcttgaagggaaacaatagttcacaactcaattgaagcaggagtccgagaaaacaatctcatctatgcttctgcctctgaggagcccaaactatctcccaagggaaggaaggtcaagcccttggttacttgaaaacgatcagctcacagcaggagccccttaccccatccaccacacccagagcacttaaaactgtaaaagagccctccaccgtcgcagcgtgagggaacctagaccagggtcagcacaccttttgtggaaagggctgaatagtcaatgttgtaggcttcgtgggctgtgcggtctctggctgccattggagcatgaagacagccccaggtaacaggtacccacataggtgtggctgtgtccagtaaaatgtctatttaccaaaacacgatggggcagaccaggctctcaggccaacgcgtgcccactcctggctagatcacagtgtgggtgttgcctatagaacacggctccatgaatattgctatggttcctgggatatctggaggcgacgagtttgcctgtgtgtagggctggatcctgtgggcctcccccaaagccagagtgccctgcacatacctcgggctttcgtgtgaacacaccctgaggttccccgagcttttctgtgcagaacagtaatggagaggtagagaaggaataaaagaactcacttgaaactttggcaaagtacaagtgctggcacctcatttcctataaccaatatcattaataatagttggcagactggcaccaccataatcattttcctgcttctctggaaatatttgtttctgggcattacgtgtccatgtgatggatgcagtaatgactctgccaggtagagcctgcagctggtctcaggtcaggattctgcttcaataagagggaattaacctatttattatgctttccctgctttcttaagaaggaaagagggctttaatttaattgggagtagtctcctagtactttgtttgcatctacgagatgtttgaaagttttatcaggtgtggctcttctggcattttcgtaatgtccagagggcagggcttgactttttcaagaaacagggtctttaggagctgctggttgggagagaacttttctgtacttccagggagctgagggtgcccagcatctttcagcttgtaaagaaatgagaggactccaccacaccacctggccagcctgggaggttctgtttctcaaccaagatggcccctctacctggagaaaccaggcaggtgggaggcactggctgagtgacccctccacaataggctcctggacaggaaagtgctctttgtccctacagatggatgactctcttccaccacctagaggccccagctggtctggcctcaagaagctctttctgcctccaggtggcaccaacagggagaaggtggcaccaacagggagaaggtggcaccagacaaagcacacagcccacgaaggctctaaaattattgttggaactacagcccaccaatctacctggcagagtcatcagtgcattcattctgtaggccaggatctacaaactacatttaaacagggtaacattgaaaatgtaggtaggactcaagtctgcaaacatgagagccacattgtccaggatacaattgaaaatcacttgtcataccaagagctaggagcatcacaattttaatgagaaaagataatcaactgatgccaacaccaacatgaatcaggagttggaattattaatatctgacaaggattataaagcagccatcataagaatgcttcaatgagcaattgcaaatcctcttgaaacaaaggaagagctgcagaaccacatagagacccagatgtaccattgaacgtgagtggcccggccagcttcataagggcgatgtcattgcccagcctctttggcttgtacttgctgtggtagacaatcttctccaccaagtgggatggggctggattgtccaacagggaaactagacccacctggatggtccatgacttggggaggtacaagctgaaatgagaagagcaagaggtgaagcacaggaaaagtccaaccactgaactcattgacctcaggtatcctgaaaacctaggaagatggtgggagaggttatcaggcaagatgtggtcccatcaccctgcttgtttatgctgtatatgcaactgcactgccacgccctacagaaacacagacccacaccccatgtgtttcccagacctcactctcagcacctctgaggtcgtcttggcatttgagggctgaactcaacattggtcactgcaaggagtctatcaggcactactgttcatcaaacagcaacaaaatagggggtaaaaatatcagggagaaccattgtgtttggaagtcttttctgtagttttcttgcactctaaactcctgagattttaagaagagacccagtacctggcccccaacatattccctctagcctcccgcaccaccgtctcaccctgtctctgccataacatggtccactggaattagctatgggaaggtctaggtcctttcatttttgtgggtttcctccagcacaggagcttccttcctcttctgtctgccctttctctaggagctacaatccttaaaacaagctcagggtcacaagttacccccagctgatgatgatgggtccacagtgaggctggagactcctctccaactgtacattacttggaggttagtctctctgtcttccctctggacccgcttctcaccacccaaagcagccccaccctgacatgacccaggagtgaacaggggtctgggaagatggtcagcagcactcactcataaacacagtgtgcagcagtgatgatccacaggggcgtgatgacagagcccccgcacaggtggtagccctggaactgaaggctggcctgccagggccactgcgagagcaaggacatgtttccacccacgatgcgtgagctgtagccccttctatgaccacaggctatggaggggaacaaaggcttgtgggtccaccctgcagacttctttgggggacatggtgtcaccaccatgcacctgctcctctctccccaccctcactgcccctgctcccagagctcacagcagctctaagacaagtgctgcaagggggagctcagcaggggaggtggtcaggctcttggggagacctgaggatggtgggtgctgtggaggatgcggtgggaaaagcacctgccctgcttggtcagtgcccagcattggcagcaccactccccatcctattcccccagtgatgacaacaccctgggatgtcaggagcaggcaggaaccttctgcagccccctcctcactgccgctggtgcacgcacctccctgactgctccagaccccacccttgtggtgtgaacactcccctctgccaggaacgaggggcactgcccgaggcctggagtgggcactgtgcacgtgtaaggaggaagtgggaactgagtcagggactcaaggctcttcagagtgatgggacatcatgggccttggtcctgtccgctgctaatgagttgctctggctgtctcccccacctgacaggtgaggccgacaggtgaggatgacactgctcccctcctccagcaggtaggggtacacagagttcccgcctggcacccaggaggaagggatacagagccccatggggggagaggactctgagggcaaggagataggacttagcatgtgcttgctccccctggacccctgcctttctggaactcttacctgtgcactgcaaggtaaccacgtggccagaggcacatccctccctaaagcggagaaaaagtaggctctgtgaaaaatgccccagatctgtgaaaggaacactcttaaaaactcaatcttagggtaacagaaaaataaattctatttccccctctttgaatatagattacaattttagtctatgttcaaaaaaaaaaaaaaccatgaggatgaggtcacacaattcattgtaaaacactcaactaacagtgaagtattgtgtacacaacaggccgttctgtatttctaagctttagatagctagtgataaaggatgtgtaaggagatatattctatcaacatgtcacgctgtcattgcatggcgattcagcccaatgttctccacctcctggcccctagggacacaagagtgcccaagggacagcgtggcaagctctctaggactccttgtagcctgggttcacacatctggcagaggactccttccccagagcaataaagtgtgattgccccaaaattgacactcctacccccacccccacacacaggtggagaccagggtgtgtgcttttctcatagtgaagggaaagggatcccaaaatctttgtaatgttttctgccttttgagccccagctcatcatgcaagagaaagctagtgtcaccagactgtggatttagcacccaacacatgagctgtccctccagactgcaggtgggtcccggggtgcttattcatccccgacggacagaccaacaagcctactgttcccagagcagaaaatgcacatcttagggtttgggcctagatgtcagggagagaatatggaattggattcagaactcttggctgtatctgctacacaccgtctaacctggggcaaggcatgtggtccctgtaagtttcagttacctggtggttatttaagaacacctggttttaccttccccatgagttgttggggaaaacatgtaaaataaataatgaatgctaaaatacttcgtaaacaaagaaggataaatttctatcttaatttctgtttttcttccttttaccctccctctcttcctccctccctcccttccttcctccctccctccctcccttcctcttttcctccccaccccccttcttgcttgcctgctttcattccccagacacacccagagtgcctgtcacatgacagtacattggtcacactcacagcattgttacccttctactctatttccttccctttctttattgggccatactccctcaggttctcacacccccagcctggcgcatccaccagtctcatcaaggtggccaactcccaccttccatctgagataacacatgcatgcctcttaagtccttgtggagttgtgcatagcatcacaaatccagcaggtgactcgatacctgtgcagacaacagcatcgcctgaccacctacctcacatatactgagtggtgtaatgcagtcaccttgtcatctggcaagaggtgatcgatggacacaaactcctcccggaactgcccctccagcgagctcactctgaggttatctgaactcacatagctgcaagcacattggaaagacagacccgacgtggtaactttacactttgaagcattcaaccgatgtgcgagtcacaatattacagggattgtacatgggggatgtcattttgtccccccaaacccatcaaaggcttcctttgccaagagaatgaagttcactcaccctggcaaggcattcagtccaggcctgctgtgttctgggatgacccccgcttctggcctgtacctgacagccccgtccacccaccctgggctgcagccacacagtgagtgaccatctcctatgtccttggttgagtcactctttgcgcattccagtgaaatgccttttgcttggcctgaagcaagtccagaggggaggtgagcacaaaactaggtgcagtattgtcggggggcacccaagcagggacaccaagttctccaagaacagtgagttggaggaacaggagagacatccctcacctgcccaggaccagcgcagagccccactggaaagagatgaacacaaacaagaaagcgattccacgaacaccagagcccagctcatttttacagtgccaggacacaggtcttctggagaacagtggtgaaagtgatgcaactttttaaagaagaatcacatgtttggagagtcacaagatggaagatggtgaataaacagccatgttctccttcccttgtgaaatgaacaaaacacagtacagtaggcttgttttcatagtgaacacaccagcttatcaacaggatttcttcagcttactgtaaatgctatgggggtgtgtatgtagaatacaaagttcagtcaactttgagttttgaggaaaatgtaatcaaggcggcgggcacgaccttcgcagcccttccagggattgctcaatgcacggattccgctggcactggcatgaaagagccgatggttgctgggatggcttggccccagtgcaggtggcggggcttgtgccaggcaaggggaccccagtgctgcaactggagccccatgaactgtccaagtctcaaaatggtaacaatgacagccacaaccacacactcgcccagtgtgctcttgcccaccaagcccttccacactcacagcgtcagcggaacttcagttcccctccaagtacgtgctattatcatccctcttttctaagaaaggaaactgaggcatgaactgtgtgtggaacttgcctgagtctacactgggatttgaacccaagcaatctagcttgaccgtcctttggttatttatttatttatttatttatttatttttgaatcacagatctctgacataggatgtagtagagcagagaagattaaagaaggattttaaggagaatttaagaaaatagaacaaaatgcagaaataaatcttagaaactgaagcaatggatagagaacaaaagaacaagcctatagagaagaaagtaggcaatattggggtgagagatgggggacatcgcattccctggatttccttgtagagggagcatattaaggatgagaaggaatattttaccaaacgggctggggtggaagagagacgggaaggctacccccaccatgagtggcctctacctgatgcctgggacagctggggctcctgacttgggtctgctgggtggggaaggagagggattgagctgagtttttctgcataacagagcagagaggccttggggtttgctcagacagagcggtggtcctccaggacagaggaggagggcagagagaagagaaaaggaggccccccaacaccccccacccaatgagtcagaggaagaggctcagcggggaagagaaatgcccaatggggaagctctcagctgtgtgcagtgtgtgtgtgtgtgtgtgtgtgtgtacctcttcctccttgtctctaaggagtaatacatcattcctgaagacgttagtgtggatgatttttgctcttctcattgaacttgaattgcagctcatttctgaatctcagttggtgtggagggagagggaggcagacctcagggctggaggctggagggcattttggcttccaccagctttggggaaagacagccgagaatatgattcatggaatttgaaaactgagactctgtggaggactcagggcagtgtggctttaacgaccccatctacttgagtgcaaagcagaatgcagcctgcctgctttgagtgctgagacttgagagcaaaggggagtaaggaggctgctaggggaacccgtggaagtacagcggccgcaggaagtcagaaggaaggggccaggggagagaaggaggcccatgcctaggccaaaactgtgtcactccaatgcaaaaaatcatgtaggcaacacaaacactaaaaagtgaatagtcaactgttatagttctttgttctacatgttgctaaacaagtgttttggatgattgtgtcttcactaaatttctgactttcaacaattggttctgtggggttcttggggaagcgtgcatggacattgatgtgaccgccaggaccaagcaggaaagtgtccaggaagctactctaggagctgcaagctgaggagctggagggttttttggttttgtttttgttttctactttgaaactttttattgcatgttcgtatctccgatcctggcctggccctgggaacccccaaacatgccacttcccatgtgccttgagcaagtcacttagcctgtctggccttggtttgcttgcctgtgaagtgaggatgatatcgggcatcctaaggtggatgtgaggatgtaatctgagagcgttaaagcacccaatagtgcccaactaaatggtagttgtctttctttattgttatcctctctgtgttttgcccatgggttggaaatgctctttaacttaccttgggaaacccagttgggcacaggcaacatttgcgtagtgacccttccagtcatcggagcacatggtcttccacgaagcagctgtgaacacctggagcacggcattctgaccacccacccggactggccgatgtgcagaaagaaaggcttattagtggccagtggaaccctgagaccataggcaggggtttctccacagccagctcaaacccctcctctgccaaatctgacccacttcttgtccacggcagcctccccatcacagagcagtgactctggatccctgagacttctcgctggtctcatcttattgcttatgtggtctccccaagagagccagagctccatggaaggccctccctgaccccccagcccaacatgtctttgggcaaacgccagttcaatcccagctgaagacatgacctaaaaatggcaatgacttggacccattttacagatgggaagggtcagggttggcttctgctgcttccttctgtttccccaggggaagagccatgaccttaccacagcggtactcgtcctccccgtctttgcaatccgagactccgtcacatcgagctatcagctcgatacacttaaaggatgagcgacatctgtacttccctgagcagtcgaagtggactgggaaaagggaggaaggcaggaattaaccaacagctctttcagagtgcaacactaacaactgtccccctgccacacagtgcggagctggcccgtgaataatgaaacctgtattgaaattgcgtccctgtcagcagcctgtttcctgcagcccagtttctgttttgaattccaaggggtggggctgctgtgccccactttatctcgctatgtggcctggcccaggaaccacagtgcaaggtgaatttagactctggaggtctcaaggtcaagagagaaactgcatggcggggggccgacctgctgagccagccgagcaaggagtcctgactgagaactgctcggccttcctggtttctcttaccgaaggcagaaagtgaacgaagtgtggaccacacagtggggcaggtggcgaattgaactgacctgtgattcaggtatttgaaagaaaaattgttccctattagagaccctccatccaaatgacccactttctcaaaagccacatgcaccttattgtaaaaacagctggtgcgcctgcattgcatgaataggtctctttgtcttctccccgctgccccggtcagtgcctccctcccacctgcaggattctatttcatcagctgcctttggccactcctaaccgggcaggttccttggtgacaaagccatgagcatggccagcagcccttgcggcaccccagactgactttacattcatgtgggcaaataaaacttcaagtcagcaaaccaaaaggatgtttgcctccagtaattaaggctgggcagcagcaaaatgctgggatgagagggggcgctcatgaaagtttaactacttggctaggtatttgagatcctactaaataatgaattgtactcactgcccagaccaatggccagtgctaatatcaatgcaatgatcccaatgacgatgattggaaaaaacttcaatggcagcagtgacaggatctgtgcagcaacagcatctgcatctgaaaaccagaaaaaggaagagcagaaagccacagaacctgacttggagtgccatgaaacttacaaatttaactatcctttccccctcccctctttgcagagaagtctcagcccaaagaaaggtgccttaattagggaaagggccacccaccaaggggcacattctctagttcagtcctacctgctccacctctgacccggttattccatgggggatgaggggatgtgctatgggttgaatagtatcccccagaaagacacgttgaggtcttaactcttagtacctcagaatggcatcttatttggagatggcctggagagtctttacagagtcatctagttaaaatgagtcattagggtgggccctaatccaacgtggctgttgcccttataaaaagggggaaaacagccgggtgcagtggctcactcctgtaatcccaacattttgggaagccaaagcgggtggatcacctgaagtcaggagttcaagacaagcctggccaacatggtgaaaccccatctctattaaaaatacaaaaattagctgggcatgatggcaggcacctgtaatcccaactactcaggaggctgaggcatgagaatcgcttgaacctgggaggcagaggtggcagtgagctgagatcgcactgctacactccagcctgggcaacaagagcaaaactccgtctccaaaacacaaaaacaaaaaggagaaatcaggacacagggacaaacatgcatgaagggaagaggatgggaggagacacaggcagaagccagcctcatgaagatgaaggcagagatgggaacaatgcatctacacaccaagaaatgccaaagattattggcaaaccaccaggagctaggaagaggcagggcacggtgccctatgggtttaagagggagtatggccttgatgacaccttggaattcagacttctggcctccagaactgagacaataaattcctgttgttttaagtcacccagttttggggactttgtttcagcagccctatgacactaagatggaggggaagtagcatcccaacttccaaggctgtttccctgcagaggagggggtgaaacccacacggggggcttgcaggcagaggtagtgctgagatctcccagaggagatgcaaggacaagatgttgatttttgtttgtttgtttaaattttttcttatagagatggggatctcactatgttgctcaggctgatgtcaaactcctgggctcaagtgattctccccacttggctctccaaagtactgggattacaagcgtgagccaccatgtccagccgaggacaggatgttgatacaccattctccacaattgctgtgcacagacactgacagctttcattccagatcatctcttcaagaatgtgtgtagagcaaacagccttggaagatacagatagcgtctccctccagagcaagaggcaggtttgtttactgtccagtttaacaaatataatgccttcctccagagcaaagtttgcacaggtctgcttgcagaccactgtaaagatgagggttcccttaactctgggatatgcagcagcaatgcaaactgcctgcacgtgcggcatacacaggctgctccacatgcctctgtgggactgagaaggcaaaggcagccagcacaaacaggatatttgtgccccttgctgcactgtgaggaatagagtcctttgtctctgacccaggactctcgtgtcttccaaagcacccatgaaactgtggcaggctaaattttggcttgcaagtagggtgacatctcaggccctttacagttcttgcccctagaaccaggcaaatctggtggaaacaatatgtaaggagtgtccagatgcctggccagaagtataagcctctctgggcagcaggagaattcccactagcactcttccctcctggggagagcaggccatttcacctaaattacctcatcaatcctaaaaatacatgaatgcccaagttgtctttgttaaaaataaggaagattggaatccagaaaggggagagaagcctgcccagggtcacacaattgcccaggatgagactggcacctgcctctcttctcctagtcttggacatgttgagccgagagctctgtcatggaagagctaaaaagatctttccctgcctgaccgtggagactcacaacttctaccctctggcaataaggagtgtgataatgaaatgatcaatatcagttgaggctgcctaagaaagaagagaatttgaagacaaaaatgatgaaaagacatggaatgcgaggagaaaagagtgtgcagaggagagggtgagcaggagatggaggaagagcagggaaatagaagctgcacttcgcagatgtggaggctgtgaggaacgcagagtgagggaggatgagagaccgtggcaagttctgtgttttaggcctggacaagctcagtggtttgttgaagctgcattatccatacctagaacagcaggggacacacagtagtccttgataaaaatgtgctagatgaatgaatgacatcatgataatgaaggccgttttaactcagggtctgagaccaagtccttccaggacagcccatctgcggtggtgagctggcagaaaggatcctctctccaccctcacacctcgatcccccgcacactaacaattctcctctataaggatgcccacccttcgtcttatacttagaaatctgcaggaaccccaggaatgacatcttcacattccagctgctctgtatttaagttggatttagaaaatgaccccaaattgtcaaatcaaagattgacatttaatcgaaaggctgtgtcagttcccgtttgccctgcttctctgtcaggctgccctgagggcactgcaggggccccacgcctcctctgtgcttggtccttgaggacattgcctggaataaacaatgaaatgtacagcatttctccaaagaaggaatgcaaatggcgcacaagtatgaaaaagctttcaacttcttgaccagcctgcccaacacggtgaaacccgcctctactaaaaatacaaaaattagctgggtgtgggggcatgtgcctgtaattccagcaactcaggaggccgaggcaagagaatcgcttgaacccgggcggttggaggttgcagtgagccgagatcacgccattgcactccagcctgggcgacagagcgagacctcgtctcaagaaaaagaaaaaaaaaaagctttcaacttcttgagaaatgaaaacaatgcaaatgagacataactacatgccaacttcacaatgattcacatgaagtgaaaggaaatggtcccccacctacagtcacaggggtagaaactgtgtaaacttcccagctgtgtaaacttagacaccggaaagctcaaaaacagatgaaagttttgacctagcagttccacttctaggaatttatcctaaaatgtcaccatagatatacgcaaatatcgacccccaaggacacttagaagaatggcacttataatattgatgcacaggaaacggaccaaattacccacaaaaaagaacgggtgaaataacaaatgaggtacacatataatggaatacctataggaggacaagatgatatagaaaacggttggagagattttctgtaaaggaccagacagtaaatacagcacttaaactttatgggccatgcggtctgtcctaacgaccccactctgctgttatggcgtgaaagcagccacagacagtatgtgaacaaatgagcatgtctgtgttccaataaaactttatttacaaaagaagggggtgggccagatttgacccatcagccatagtttgtcaacatctagaaaatatttaattatttaatgccatagaaaggtgaaggtgatattgttaaaattttttaaaagcttcaaaataatacaaatagtacatgttacttccaaaggaaatatagatatatagatagaaaaaggcaagaaattcaataataaattgctaataggattatctctgagtaatgatgccgtcgtgggtaatttttaaaaatcttttcaatgaactgtattttctaaattgttcttctaatgaacaatacattactctatttacaaggaaaagtttttgttcctccccactacttagtcatagcaaaataatcaaaaaataagagaaaggaatattatagtgctattaatattcatattatttatattataaaatattaggaacaactataggtcaaactatgatcaaatggctgtgtaaattgcatatctacttgatggaatactgtgattccataagaaaaaatttataaaaaccttttatggaaaaaacccacctgcctatatctgtactgtgcatgaaaccacacatacgggcaaaagcaggaagagactttgcagacataaaaaccaggtaagttttgggagtcaggtgattgcaagatttttttttctttcattgacacttagctaattttgagccatatttttaaatgtgtgtcttttcagttacttgaaacctcttctcccacctcccatcctttccaaacctcctccaagccaattttccagttggtttaaaagaaatcattagggtgacccccactcccactttctggaacctcaggcagagctcctgtggttcctccctagcaccaatgtgtcaggaatctgcctgcgtccaagccctgacttccagaaccggcaaccccacagctccctttgaccagtcctgactatctctggtcaaaaagatcctagccgtataggttgctagagagtccactgttttatcaggcatttgtgacttatttacgaaaccaacttttttccttcagttgttaggagccactccgtcatctgctgctggattttaatctaggcctctaatatctttggcgacatccagtttatcctgagttttcggagggactggtggccactgcttctcaggacttcctggaggactcagagatttcctggccaggatctgacctccttcaggattgacaggacaattgtggagccccagtctctgaaaacctccaacaagagaagaaaacaccggtctccagggagagagcaaagggcttaacgaaacgatcccctctccaatgccccttctccctgagattctgcagatctagggaagtgcaggtgtccagcctgtgggtgtcagaatggctggggagatatttcccccacagggacagtcagtcacattggtcacctacatgagggtatgggcagaaatcacagagtcctcacctgggtccacttacctggtgcaacaggacttattttcaaatcatcaaggccaaaaagcgatcggaatgagaagggggcttcaacagcaggcggatcattttcccccatggtgactatttcaggacctctgacatccggctccgcctccacctctacctccttagccgaggaagaacagaaagcatttgttcccctatttatacttgtagcatcaggtgcatcttggtcatacggtaaatctttgaaattcgacagtccacacaaagcgcattcagtatcgattaaccaaaaacagtcatctggtgagaatgcattttcgtctgagctacagcagataacagaaaagcttctagaattagcaaaaaaaaaaaaaaaaaaaaagtatgaacttaattctgctaagacaatgactttcccattgtttgtccaaccaatcttcaaatcgattgctttagagggactccctctcaccatttagaagttgccatattgctattgttcagaagataaattactctcaaagccctttccattgcttttttgcgattgttttcacctgtcccacataaacgcaattctttccctgtgcgtgtggtacacctaccataagcataagtagtttcggtactcacataattcccgagtcccaaaaatgtagatggcaccacggaagagatagtaggccacagtgttactggcttcccataaacacagccctttcctggctcacacgggcatgacctaattaagaacgaaagtacccgagccgtccggtgcccggtccttcccccacatagcaaagtggggagtggctttggaccaacggcttgcatcaaaataaccccggggctgtgtttcctacgaaagaattccacctatcacaatgccaaggagaccagagacctttctaagtcattccctgtaactctgagagggcggaggaagcagggaaatagcagaagattcccaattaaattctagttccctctcccagatatcaggcatggctgctctgggaacctgcttcctccaagggctaaaatccacaggggctccagcaggcacatcagcacagacactcagatcatccgctttcattccctttgtgactacctgttgtaacgtttgaaattccaaagggatctagtaagccatttgaagcaacccgtgtttcccaagatcatagtaaaatctaaacaagagttctgtgccaaaaatgttcatttcatttctatcgcaagaagagcttgaaagagtaacttagaaaagcaagaagttcatgttgggccattttctggctttcattcttgctgatacctctgtttattatcagcatgtagcaaattacatcgtttatccatataaaaagaataagtgggcaaatggcttctgaaagatggaacctgggtgagaacatcccctcccaaacaggctgtggttggcaagctgtacaacactgagaagtgttgagaagcatcttctctcctcacacccattttactcaccatttctggagctgccatcattaaaagcagaaataatttcctttttcattataaaaacaagtgtgatggtaagcaggccgccaacaggttagtccaatcggggaatattttccccaagtcactcagccttgtcgactcaatcatcgcagcaaatggcattatcgcgggcatctgtgtaacccaagctgccgtgggcctatcaaatagcccttggtggtatggctgcagagaccagggagggaaaaatgtggcttccctttaattagtcagtaaggtgagcaaaccttttcagaagctttgcatcagggagtgatcggaacacagccgctccttttacttgaaagaaggggtaggctctgcccagtgctgagcatgtgaccgtcaagagggcagacatactctctggtgggggtttctgtccctccctgtaactgagcccccaagttcaattctgcagctactcctgcagacaaaagatggggagcctgaagatgctcatcacagcctgcgctccacaaaagacacgtcatgtttccttcctcggaggcctctgcatcccaagaggcttctgcacacagcactgcttaaaggggtttaaccgctgctgtggggaccagagcgctgagcatctttgaagggctgaatttaccattgtggatggcaactcgcaaatccatgcatttattcagcaaatatttagcaagcatctgccatgggccagactctagacacagtgcagccagcaagaaaaacaaagtgctcccatggggccccagatgttaagcgctaggaagagattaggccggggagggtctgagagagatgagggcagagtggtacaggacggcctctagggagagtgttgtttcagcagggaccttgatgatgttttagtagagaccttggtgaccagtgaagtgagtcttgtgaaattcctccaaggagggcgaccaccagctccaaagcctggaataggggccacgctggagtgtttgaggaaccccaagaggggccgtgagcctagaaagcagggaacagggaatagccgatggcagatcccaaggcccaggggcatgggaagggctctggtttgcctttgatgtgtggaaagccttgggcgatctcaatggggcaaatttgggttgacaggcagggcatagagtggggtaaggatggggggacacaaggacagccacaaggaggctgcacctcatgggccacaagggccatgactcggcacgagtggtgatgacggtgaggactggctgcctgaggttgattttgaaggcagaattggcaggatgtgctgacggcaaacgcctgagagatgcgtccaggcagtccttgattaagacagtcttactttctccgtcccagtaggtacctgcccacacacctgtcagtgcctttgggtgtgatctatggtctccttcaagctcacacatctctccttcacctatttcctgactactctttctggtccctcaacgaatgtttgccctcaaaggcaatgacaggaaatttaacatgtcattctttctttgcttttacctgtgtgttataggagatgctccccgctggagtacagctctggcgggacagagtctggaatgcactttcactcctaagaccccgccgtgcccagcacagccatgtgtgtgtgacaggggctctgtctgcatagaagagctgatcataaaccctggggggacaaataacaccaaatcgacatacaataaccaactacgagggcatgttaacacgtgtgtcagatgtaggtcaaaggtcaagccagctccccacggggtagcagggagaggccctacaagggtggctggtcttccttgctgtaaaatatcctctcagaaagtttaccgacaaatcaattccactgagctcaaactaaaattttgaggaaccaaacaaataagcttatctggggcccagcgcgtgatagttacgcagccagtgccatgagcagacttggtttcagggcatgagcgccttatcctatcctgatgtctcctgggagccccatgaagctttagtaacgatttgcaaacagcttgagttacaggcacattctcttcagtaagtgagggaggaaactggtagactcttccctgatgggcttggaagataacttttcaagttaggaaggcaggatgaagctagatgtaggcatcttctggcctacacaaataagatttttttaagagaaatgcatagaagcatttttcattttaatatgttataaacataacacaattgctcaaaacagggtttattatttagaagagaaaaatatacttgagtagagactatatttcatacccaaatctactttttccctctgggtcacaagctttctctatttgcagactttcaaattcaagataaatcatttgattgtggaattatttcatcttttgaattcctcaaagaaaaaggataatgaagtgtgtggacattatgctaaatgaaataagccagacggagaaagacaaatactgcaggatcgcacttatatgtggaatcttaaaaaaaaaaaaaaaaaaaaaaaaaaaaaaaaaaaaaaaaaaaaaaagttgaatacatagagaataaagtggggttctcaggggagggtgtaggggcaggaaatggagaggtgtggatcaaagggtgcaaagctgcagatgtgtaggatgaagaagtccagagacggaagatacagctgacagccagaggtataatatcttattgaatactgaaaatttgcccacagcagattttagtttcggttaccatgaaaaaaaagtaaaaaaagtaacaatgcaagatgatagatatgttaatttgcttgatgacagcgctcatttcactattatgaatatagcaaaacatcccattgtacaccttaaatacgtacagtaaaaagaatattattattatatttatttattattattattattattttgagactgtctcactctgtcaccccggctggagtgcagtggcgtgatctcagctcactgcaagctctgtctcccaggttcacgccattctcctgcctcagcctcccaagtagctgggactacaggctaccaccctgcccggctaatatttttgtatttttaatagagacagggtttcactgtgttagccaggatggtctcgatctcctgaccttatgatccgcccacctcagcctcccaaattgctgggattacaggcatgagccaccgcgcccggccccaaaagaatattatttaaaaatcaggcagggcacagtggctcacacctgtaatcccagcactttgggaagctgaggcaggtggatcacctgaggtctggagttccagccgggccaacatagtgaaaccccatctctactaaatatataaaaattagccaggcatggtggtgtacgcctgtagtcccagccactcgggaggctgaggcaggagaatcacttgaacccaggaggcagaggttgcagtgagcctagatcatgccaccgcactccagcctgggtgacggagtgagattctgcctcaaaaaagtgaaaataaaactatacaaataaatatcacaatatgctcacatttaatggtgaaatattgagaccttgtcctctgaaatggagagttatacaagaaggtgcactagtaccacatctgttcaacatttgacttgggttccaagtcagtgcaataaaggcaaaaaaaatagaaggaactattatgcgtagagctgccatgaacattcatagaccaatctttgtgtggacacacgttttcatgtatatttacctttataagaaaccctccaaatgttccccaaagtggttggacagttacgcattcccaccagcacagtgtgagagctcctgttactccccagccttgtgtaaacctggtattttccattttagctcttctggtgggtgtgctgtggaatcacattgcggttttaatttgcatttccctgatgactaatgatgttgagcatcttttcatgtctatgtatatatcttctttttaaaagtatcttttttgatactttgcccattcttaaaatagatgcttgttttcttattatttgttataagtatatataaaatattctgtatattctagaaacaagtcctttgtcagctatatgtatagtgatactttctcccagtctgtggttcaccttattatactctttaagatgtctttcaaagagcagaagttttcaactttggtgaagtacagttcatcaactttttcttttgttggtttattcgctttatgtcctaagaaagttttgcaaactccaacatagcaaacattttttttctaggttttcttaaggagttttatagttttagcatttacattttgagttaatttttgtatataatgtgaggtaagggttgaggttcgtttttcctcctaccaatatgcagttttcctagcactaatttttttttttttttttttcagacagggtctcattctgtcacccaggctggaatgcagtgatgcaatcacagctcattgcagcctcgatttcttgggcttaagccatcatcccacttcagcctcctgagtagctggaactaatgccaccatgtcttttttttttttttttttaagagacggagtctcactctgctgccctggctgatctcaaactcctgggcccaagtgatcctcccactttggcctcccaaactgctgagattatgggctgagcctctagcaccatttatcaaaagcattatccttcccccattgaatttcattggcatccttgttgaaaatcaattgattgtaggtgtgaatctttttgcactacccaatgacacactatgacacaccatggcaacctgatttgtaaatgtttatgaaaaagcaaaggacaaaaccagagggtttagcactatagtgattaaaacagtgtagaatgggcacaaagagggacaaatcaaacaagagagcacacaagttagaaaaaactaatccatatacagtcacttgatttacaataagcctcctactgcaattcactgggcaaaggatagccctttcaatgcggaagtagatgaaagtttacccctacctcacaccatacacagaatgaattcaaatggatcatagagctaaatatgaagagcaaaagtagcaaaacttctagaacaaaacatagatgatcttcatcgatgttggattaacaacaatctcttgaacaggatgcagaaaactctaaccagagttcccacaaattgataagaaaagcaaacaccctagtgaaaaaaaaaaaagagcagaatatctgaacaggaacttccccagagaggatattcaaatgggcaataagcctgtgaaatggtgcccaatatcattatccctcagggaaatacaaatgggaaccacagggagatacaactacacaccacccccaccacagagtggctaaaattagggactgataatattaagtgtgcatgaggatatagagctttgtacaactgcttggcagttcctaatggagtttcacgtgctctgtgatccaacaaccccactcctagatgcacacctaacagaaatgcatgcacaaggcactcaaagacacatacaagaacgtcctcagcaacattagttacaatagcaaaacaaccgaaaacttcctgaatgcatatcaacagagaaatggataaatgaattatgttatatttattttatttatttatttttgagctggagtctcactctgtcccaggctggagtgcagtgatgcaatctttgctcactgtaacctccacctcctgggttcaaatgattctcctgcttcaccctcctgagtagctgggattacaggcatgcaccaccatgcccaactaatttttgtattttttagtagagacagggtttcaacatgttggccaggctggtctcgaactcctgacctcaggtgatccaccccccccttggcctcccaaagtcccaaagtgctgggattacaggcgtgagccaccacgcctggctggtatatttattaatcaaatactacacagcaataacagtgaactaactgtggctacaagcaataatgtggataaattttacaggcataatttgaggaaaaagaaatgagatatgatagagaatatgctatatggttctatttacataaggctcaaccacaggcacaattcatatacaagtgatacagcagtttactttctgggggagggaggagataactggaggaggctgagctgggggcagaggtgcatctgaggttctgagaatgttccagagcaggctatctccaccttggcactagtgaaattttgttggggagactgtcctgggcactgtgacattcccggcctctacccactagtgccggtaccacgatgtccaccccacccaccaccacccccgcctcattttggaaacaaaaatgtctccagacatttccaaatgtccccttgggtggaggaggtacaaaattcccctggttgccctgtttgattttgggtcgtgggggaattaggggtgtgggctcatttatggaaattccttgagctatacacatatgattcatcaacttttctgtacacatataaagcttttaaagtttttaaaataaaaaaacaagtcaatgaatgactgaaagaaccagtaagttttccagcaatccgagacaatagatagagtggggtttaatgtcttgttcacagacaaggagactgggatccagggtgggtcagggcagggggccagcaggatccaggagggaactcattccctgacttctcctccgcttccttcccccatgctctcacgcattcttgctcccgaatactagccaagtccctacagaggctgatcccgtgcaggggctcggttggacctttagcctcaaactcccgtggtggaaacagttaggattggtggacgctgcacccagcatcctgcaaacagaattctgaaaactgatatctcatgcaaacaggatatcaacttttgtcagaaagatcaaaaagagcttgaggtttttcttcacagcctcagccttgcctctccccctcttgctttatctcctcatttctgtgtgcaggcgagcttcttggcctaagggcaggaagagatggcagcgggggagacgcagctctacgccaaggtctccaacaagctcaagagccgcagcagcccctcgctcctggagcccctcctggccatgggcttcccggtgcacaccgcgtgagtactgcccagagaccccggggcccagccagtaaggctggtgccagaccctgctgcggcccccggcatggagctgcaggggtgtagggtacggcttcctgccaaagcagtgcaccttgcagggtaagacactgcctcttcacagggccctcttctgcttctcgtaaatgaggtgatcttgaccaagcttgtccaacccacatgaggcccaggacagctttgggcttaagccatcatcccacctcagcctcctaaggctgccctgttcaatttgtgttggctgcccaacacaaattggtaaactttcttaaaatattatgagattttttttttagctcattagctattattagtgttagcgtattttatgtgtggcccagggaggcacaagaatacccctgatattcttgaccttttaaagaccagctcggctggctgactgggggaccctgaaatttgtgaaaatcagaagccatgtattactctgggtgccccattttgggggtttggaggagattggggcctggttgtaatctctttgtgtgcagctcagtgactctgaaagtggcgtttcaagatattcaaactctaacgtgaaaggccccaaagcccgctgagtctctaacactgggaccaactgtcagcagggctgtgcttccacgctgcccggggaaagtcacttgtcctcagagacaatcccttgagtgtctgataacgaaacaaatgggtaggaaacttcagacacagtgtgagcgcgaccctgcttacccaagggaaaggcctgcatgtggaagagcttagccttcagagttaccactctcggagagggaggccacgacaccaacattgggttacagctttcatggcaaaccagtgccttaaatctgacccattcattttttcacatggaaaaatgtatcagaaacacactttaaatctgacccattcattttttcacatggaaaaatgtatcagaaacacactttaggtaactttgggttggggaaggagctaaactttccttccacactataacaaaagcttggccaaattgggtgaagtaactctgaagctagacaaacccatttcttctccccaaatcagggctttgtcgtcactgttatgttcaagctaagccaggggcctttgaatggggagtggggtcaggcatgtgcagggcggccaccgggcaccgtccaggcattacagacaaggcagcttttgtccactgctcaccacccagtgcaggcaggacactgggcccagagagtgcattagtggcggaggtggaacccgaaccagctttccatgcctttgaaggagtccacgctggattttactactaaacgtatagcatggacttctactcaaaattccttccagtttaaacattaagcacatgttggaggaagagaaatgtgtgttaatttccccacaccagagcacctcatagtaagtgccctgcaccaaggctgccttgttcaaacctctccaggtggccacagccccatcggtgcccacccaaatagcagcattcggcatcatgtggtgggttcctcatggacgcccgctgtttccagtctgcattcctgataaattacctttgctatattccattctgtttcatttggtccagttctgcccaattcaatgcaatgtacttacgtcccgggttaccgtgatgaataagactcagtcctgtgttcagggagttcttggtctagcaggggagagccgtgggtgcaaggggactgtgtaagccgtaacaagtgcctgcctgggtgctttggaaagggctgtttcccagcagagaggtgtgggaggcgagcctggggatcagggtcgctgatgctggggtgaggaaagcgtgtgtccgagccaggggcacgttccgcagggtgggtccatttgatctaggcagtggggggggggggggcaggccagggagagggattgcaggagcgggcggaggtcaggtcctcagccctgagaccccgtgccaagggctgaagcgggtagccagggaaggacagtgagggggaggtgtgagctggtcagcattgtccaaaaccacgatggcagcactcaggggacaggcgctagaacttccagctggaagttcagcatcaggccctcttcagagcaccccccaaagatcctgggtgtgcaaggccacaccctgcctctctgacccttttcccaagaatgggcgacgtgactttgtgtctgtgtctgctcttctgcaggctgaaagcgttggcagccacggggaggaagacggcggaggaggccttggcctggtgagtgcagctgcttctgtagacccaggggcgtttgggctgaattccctgtgcctaaggactccctcccaccagggctgataccaggaagagccgggcgcctctgggtgggatggggccactgcggaagtgaaacaaaataacctccctgcctacccatagtgcactgagggaggggcacagggctttggttaaccatggaaagagaaagagagaactctgaacaaggctttcttcacttacaaacctgattcaatccaatttgactgccaagaagaacaggttcatgtgctttgttgagtaaatggggaagacatgattgttgtgttgtgataagcacgtaaatgagggtaattgttagaataaagtaattaggttaaaaatggtaacatttgggtttatattagtactgctaatattcagcctatttcagtaattgaagagcaggctgggattttgcatacttgtgtttgattatgtcctcctcaactgcctactacgatggataagattgagatagataggaggatgtttgtgtttattgatggaaagatttgagacataattgacatctttgctgatagagactagcggccaccatgctctcgggctgcctctgaggggaagggagtttactggtggtcatgaagccaggtgtgtgggtctaagggtgccaggtgtgtgggtcgggtgagggctctgatttgaggtgacctcaccaggtaccagctgcgtgagtgattcttcaagccacccactgccatgggcctgttctctgctctggggatggagaggagggccaccgtttctctaaaaccctctcctacccggatgtgctgtggggagtccttcatcctctgccctgagatagccacggggaaaatcaaacaataaaaaccaggtcctgggaggctggagtgtcctctccaaagcaggagggcagatactgatcctgggtctctgaacgtgcagtgttcccaatgggatgccccctcctcctccagaaagtgtaggccacgggcaaaatgggcaaccccttcacagagtccactaaagccagttgccaattttggatcagaaacaagcccactgctgtgaagggcatggccagcacctgcccactgcaacccagtcaataagactaggaaccccaccaaaaaatagggaggcaatggggtcccctagactgtcaagagcaccccaacctctcactagtaaccagggaggtggtgcaaattaagatatcattagagcaaacaaggtaactccaagtgttgatgagggtgagggaagcagggcctcacacgtcactggtgtcactgaggaaggcagtgctgggtatctgccaaccttggcaatatgcacagcccaccagcctccgtcgtgcgtctaagcagattccctggagaaatgcaaggagcctaaagagacatgtacaaagatcttgattgcagggttatgaaatggttttaaaataaaataatttagatgttcatcaatgcgggaatgaacaagtgcaacattgtatatgtatacatgaactattacacagcctttaacaaattcgcgctgacaaacttcactagacacgtgtgtatcaacagggattaattgaaaagacatggtagaggaaaaatgccagttgtagaataatttgaataacagcttatgatttatgtaaaacaagtgctatctataagtccgttacttaaatttctgggagaaggcaaagcagcttcaccctctgggtgaaccctggaaagggggagggtgggaaccacgatggagaggagtggcaacttcttctgtgatttttattgaagagaatatggtcttgcgtaagttctgtttcctctagtgattgaatactactttctaaattgaaaattatatcacaggcactttgctgagtaattagaaattcttccaaaccatgatttctaatgaatgcacggtaaatagatttgctatcagttatggagtttttcttctttcttctaaataaccctaaataaccttctaactttcttctaaatagccctaaatagatggttcatgtgcaaagttttgcctatacagtactttgtgctctttcctcgggagaaatttctggaagtagaattattaatgcaaagagtgtgggcattttaagactctcaatacctattggcaaattgcttcacataaaagttgaaaggtctgtccttaagtcctgctgcatcttttacacattgagcagaacttttatcctttttattgaaaaaatctttgtgaacttgacagatgagaaaaatgccgtctcggagctattttatttccatttttattgttagtgacaatgaactcctatgttgggtcatccgtcgtttttcctttaatttaaaataactgtctgcctgaaatcccagccagtcaggaggctgaggcaggaaaattgcttgaaccggagaggtggaggttgcagtgagctgagattgtgccactgcactccagcctgggtgacagagaaagactccatctcaaaaataaaataaaataaaataaaataaaataaaataaaataaaataaaataaaataaaataaaataaaaactgtctgaatctaaagaaacgcagcagctacctaaattttgtctaggtttttggttttggtttttatatgtaatttgaagtttgaggtaaaatacaaatgtgaggtttttccacaaaattttcccacaccatcaaggagatgctgggcccacggatcattggaagaccaggttttaggtcttgctgtcaactttctttcattttttctacctttgactttggaatcagactaaggtgggtctgagagcaggacttacactgaccaggtctgtgccacacacagctgtgccgcagtgcctcccaccagtaggatggctgtgagattaatttatgtcatgagcatatatgatgtcttcagtgtgccctataattctgcattgctgtcattgtcattctgttgtgtatcctcaaaggggaaaactctttttgttgtgacagtgggtgatgccggcttgctctctgttgcaggctgcatgatcattgcaatgacccttccctagacgaccccatcccccaggagtatgcccttttcctctgtccaacggggcccctgctggaaaaacttcaagagttctggagagagagcaagcgccagtgtgcaaagaacagagctcatgaggtcttcccacacgtgacactctgtgacttcttcacggtgagtcaacccagtgtgccttcaatgctcacggcagctggaggcatttttctgtgctaactaggccatgatgggacaaagttgacttatttaaatgggatagtccagaactgcatcattagctggcaccttcatatgagctgtcctttattttcctctttgccttcatctggtcaactcctattaatccttcagaacccaactcatttatcctctcccctttttgagtcttctccagctccccaggcaaaaggagttgctgcccattttctcgttcatgtgtctagtggcacttttgtatcatacgggccatgtgtctggtgcagcaccgcatccctcaccagaccgagtccctcaagggaaggcagatacctcactcatctttgcacccccagaaactagcacagcccctaaaacagagtttgtgcttccaaaatgtgtggtaagtcaactcaaggatgggtgattgttggctacccacaaatgcagaacttttccctgtctcagggaccagccgtctgattcagaaaaaaaatggcccagtgggtagctccacagcaaaacacaatggcccagcaggcagctctacaggggcaccgggaagacaagaagaatgtgggagctgctcaggagaaaagaaggagaagggagagacagacagccactgctctactcagctccgccagaggggcttaaggaagggcacacccacttctgctaccgcggcctggccccaactctgctgttggcaaactgatttgttccacccatttcaaggaattccatcagggcccaaggaaccctccattccaacaccaggcccctcggtgctggatggaaaggaggaatgcaaacctctgaagggaaaagatttctggaagatgtcccaggagaagcagtaccttccaaagcctccaaccaccaccccggattgcccgagacttgcagggatccccagagcacaagactaaacctggaaaagccccagaaaaatcgagagagttttccccctacatcgacatcaatggtacttgtgacaagctgactcccttctggttcaccctctggagccaacggggaaaggcaaggcagcccaagccatgtgacacagctcagaaatcagagcaggccttggccccccactccttccccagcccactgaggtgcaagcacacacacacacacacagatagacacagagacacacacatagctcacacacatagacacacacagattgacacagagacttacacatgcacacagatacacacacatacatgcatacagacatacatagatatagacacacagacacacacagatagacacagagacgtacacacggcacacacagatacacacacatacatgcatacagacatacatagatatagacacacagacacacacagacatggagacgtacacacggcacacacagatacacacacatacatgcatacagacacacacagagacacagatacacacagacacacacagatagacacagagacgtacacagcacacacagatacacacacatacctgcatacagacatacatagatatagacacacagacacacacatatatacatgcatacatggatacagacatacacagacacacacagatagacacacatacacactacatgtacataggtacacatgcaaacagatacacacagatatacacacacaggaatacacagatacatgcacatagacacacacagacacacacagagacacacattagatagacacacatgcacaaacacagacatgcacatacatgcacatacatagacaaatgcacacatacagacacacacataagcaccacatgcacacatatgcacacagatacacacatgcatacacacagacacacatatagacatacgcagacacacagacacacatagacatacgcatatgcagacacacacacagacacacacacatatagacatatgcagacacaaacacactcacacacctccctctgtcgttagctcctcccagtcccccaccccagttctggcctggccgtggttagtggagctcccctcacaggcagaagagtgtaacggagactcactgtgtaccttgatgctgtaaaatgaaaacactaatcttccgaagtgtgatattgatcacagctacacttataacatgactattcttgaaaattacatatctgaggccaagaaacacaatgtgagacggattcaggaatggacatgtgttcactgggtggttttgtgttgagtgccgttgagggttgcagagaaaacagacagggaggaatgtcaggccggcctgtccatggggagacggaagctgcattaaacactgtgatctggcctcatacttgggcttgtaagaagcactgtgggaaattccgagggcagcccggtgctgggaagagaagggatcaggccaactcccgccaggagggtgtggtgtctgggtttcccctgtggtccgatgtggccaatggcactgggaaggttttcaagcccaggaagcagcctccccagggcggtaggcaacaccgagcccagatgtcaggagaggctgcgtctggctggaggatgggggtgggagccccgtgggcaaggctgtcgggccagcacctgtcgggctccgtgggcctgagggattctccaggtgacagagagcctgcggcctcaggggtgggagctgcatcagaaagagggtcctgcagccactcagggggcatcagggaggccgggccaggggctgtgcaggctcaggtcctccagggagcagaccccaaggcagaattcccagtgcaggagacgcacaggggagagactgctggtgaaggcaaaagaggaggagagggttggaggcaggcagagcctcagtgccttagaggagtccctgtggaacccgactcagtgctcagccgtggaagagagggtggccccgcagctggaagtgcagctgagtcccgctcactacaggctctgagcagtgcctgggcagccttggagtctgctagaaacctccagaagccaaatcatgcaaacctgagcaaagcagtgtgccatgggactgaggaaagggcctggcaggtgatgagcacgtgccatggagggaggggatgcagttcaacgaccaggggatttccaacctgggcacctaaaggagactccaacctgcaaagaaacttacctgaaatatttgaaaaaaccgaggtccaggtatagaacaaatccataaccccagacacaaagggacgcaataaattatgttacagcgctttgaacagaaaagaatctcactttaattgctgcctgattgttattaattaaattaatagatgacttctgatgagaggtgtggaaacacaggctctgtctctgtccccttagtgtgaagaccagaaggtggaatgcctgtacgaggcgctgaagagagctggagacaggctcctgggctccttccccacggccgtgcctctggctctccactcctccatcagctacctcggcttcttcgtcagtggcagccccgcagacgtcatccgggaattcgccatgaccttcgccacggaagcatctctcttagcaggtgggcagccctggccagttgcaaacacagggctggattcacagtgagtgagccctctgtggcagggactagcccccggcacatggatgcagtgggtgggttccaggggagcagagcccagcagcaatggtgggatggctgggtgggctttcttccgggctcagtggctgcacctgtcctcacccaggcacttccgtttcccgcttctggattttcagccaggtgcctggacatggccctaacctgaggctgagcaatttaactagagcctccttcgtgagccactacatccttcaaaaatgtaagccattagaaagcttccggaccagctttggtcttctctttaggcgggaatagccttgttctcattatgtggtttttaaaatgcttagctatatgccaacagcctgggaaagtgccccagaagggtgtgccaagcatcaagcctgagtgggtgactgtgacggggttggaggctggtgcacacagggagtcagggcctccccaccccagccttgagtgggagacacacaagtcctacgtgacttatttctgtattttcagtatgagcttagtgctctctccttggcctctccagggaaagattatttagactcatattcagaatcatcaaaattcccttctctccaaacaccagccctggcctggagaccaaggctaccattggggtttagtggaaaggattgtggacttgacgtcagaagatgtgatttttttctgtgtccctgatgagtggcatgaccttaatcaagtcatgtccactctctctgtctctttttctttctctacaaaacaatgagggctctcactcttcaagaacaatgttgcctgagtctgtggcccatcctgccatagttcccgggacacagaaggcactcagtattgctgagatttgccgactctaaaatctgacgaggccgcagtgccttggtgggagggctccccactttctctctctgggagcgtgtctgtctgtgctcagacatgtatgaagcacagatcctggcctgtaaatccatccctgaatcctgggcttccacttggatggcagcttgtgagtctggagatcgaatctgctgaataattagaaagtcgcccccggtctttgtggattagtatcctttatcaaatgatggctctttcacacccaggccctcccccagtgaacctcattggcagcatcttaaaaacaggaagactgaggctgcaaagggtgaagggcctgcccaaggtcctgtggtgtgtagagcggtgtcccctaaaaatgtttgtccaccaggaacttgggaatgtgacctcacttgggaatagggcctgtgcagatgcgattggttgggaggaggtcacactgcattagggtgggttcccgtaagggtagaggccgcacagagacacagagaagccatgtgccgactgaggcagagactggagtgatgtagccacaagccaagggacgcctggggccaccggaaactggaagaagccaggaaggacccttcccaggagctttcggggagagcacagccctgccaacaccttgattttgaacctctagtctccagaaatgggaggcaatacatttctgttgtttgaaaccaatctagtcccctaaccaggctggcggagcagggacctgaacccacctctgtcctgctccatgctgcctgggttcatgctgggcagccccacttcctgtgggagccagcgttgacctcacatctacgccccgaccctaagcaggctgtgtcctgcccttccatggcccatgctctcagcctgacaccgagggggtggaggggactctctcagtgatgagtgaccagtcactgctctgaagtggccgaggtccctcttggggcaaatgcatgaggcccccttgcccgcgttggtcctccccagtgaaacgtgcccataggcacaggtccgcagagagaaggaaacgcaaggacccgttcagaagtcggtgtgactcactctgacgtcagcaacctgcagtgggtctttcccaggccacactcactcgcatggcaaggcggtcctccccgactgctaaaaacaaaagtcaggaaaggaatttccccaccacctacacactcatgctgctccccaccacctacacactcatgctgctctgggctgtgcagcctcagtgccccagctttcctagagaccgtgggagcttcccatttgcctctaaaggctcacctctcacgtgggagacagcagtgagccccaacttcggggctccagggaaaggcttgcatcaaccttgaccttttttagggggtgagcagatcctgtttgtaagtgccctgccgtggagtgggggcagggtacgtctgtgcaccgacacggcgtctctagcaggaaactttaggttaggaggctgatttcccactgcagccttggcgagcaggcgctgccgtcctccagcagatgctgctgaagcagaaattgggcaggcccagaggctcagtcaaggtcaccctgcaaaagggggcaaagtgcagcctaaaactaggtctatctgacaccaaagtttgtgttgttcccgtcaagacacagaccgcctccctaggacataaaatactttgtggctcaactgaaatcagatcctggctgctttggtgatgccagctgctctgctcagactgacctgagagcccctggcaggaccagggagggctagggccacaggggcagaggacacccaaaaagacctgaggctcaaccactcccaggacttcctgcttcaccaaaacaaggtgaaccttaaagacactgtgtgttttatagttttgttgcctaaagagttttcttcttgaaactctacgattaaacaaaaagccgttgaactggagctcgggcctgcaagtccaggccactgggtaacgtgcacaccccggggaatggaggagccgtttactctgtgcatctgaatcgtgcattcgggcagctagcctgcaaaccgataggcccccgagaccctgaacccacatctccatatcgtcctctttcctacttcctggaaaaatctacagggatccagccatctcctttatgatgtgagttctgagcgggccaaatgagctctgagttctgagagcccttgccttgtggaggaagcatggaggtcggaggaaggagacatttaggtaacggtgtcctggcaccctctgtgtttccctgatttcacagactgctccgtgaagccttgcaccaaacagctgcatctgaccttggcccacaagttctacccccaccaccagaggacgctggagcagctggccagagccatccccctgggccacagctgccagtggaccgcagcactctactcccgagacatgcgctttgtgcactaccaggtgagagagctgagcaggggctcataagaagcagatgaatgggctgggctcggtggctcacgcctgtaatcccagcactttgggaggccgaggcggcggatcatgaggtcaggagatggagaccatcctggctaacatggtgaaacctcgtctctactaaaaatacaaaaaattagccaggcacggcggcgggcacctgtagtcccagctactcaggaggctgaggcaggagaatggagtgaacccgggaggcggagcttgcagcgagtggaggtagcatcactgcactccagcctgggctacagagcgagacgtctcaaaaaaagaagcagatgagtgaacggccactcacctgacagcatgtaccccctggagccctccaagggagatatgttagtagcaaggaaaatttctattgcttctctaaagccattctctttcttgtgcaatttacaaccagcattcttttatatgtgagttagagatgcacagacaacaaaatagaagcatttccaatattagaaaaggaagctgggtgtggtggctcacacctataatcccagcactttgggaggctgaggcaggtggatcacttcaggtcaggtgttcgagaccagcctgggcaacagggcaaaacgctgtctctactaaaaatacagaaaattagccgggcgtgatggcacgaacctgtaatcccagctactcgggaggctgaggcagaagaatcacttgaacctgggaggtggaggttgcagtgagcagagatcgtaccgttgcactccagcctgggcaacagagcgagactggcaaaaaaaaaaaaaaaaaaaaaaaagacagaaaggaaaggactattgtaaagatctatgaatacatgttttgcttattaattcttttttatttatttattttttaaatgtaggggccatgctaatcttctctgcagcattccaattttagttatatgtgctgccaaagtgagcacaattcactttaaagaatgatttgagtgaaacctcattctgggacttcctgcccatgaatcgatgggtttagaaacgaagtgtgtgatgctcctttcagacccagagagcacgtgtgaatgaatccaccatgttctgtatcgtatgaggtgtcaataacctcacaccgaggaaggcggatgtgaaagtctgcttatgccttcagatcttttgtagacaaaaaagtacctagatggatggatgatggatagatcccaaaatgtatctcttttttttttctttttttcttttttttttttttttttttttgagagggagtctcaccctgtcacccagggtagaatgcagtggagtgatctgcgcccacttcaaccttcgcctcccaggttcaagtgattctcctgcctcaagcttcccaagtagctgggactacaggcacccgccaccatgtccagctaatttttgtattttcagtagagacggggtttcaccatattggccaggctggtctcaaactcctgaccttgtgatccacccacctcggccttccaaagtgctgggattacaggcgtgagccaccgcgcctggccccaaaatgtatttctaaatctatccaaagaattctatgctgcgtttcattacattctgtgctatatattgccagacaaagctttggatggagtcttggagacacagaacacattggaggggcagaaagcaggaggtggcaggtgataggcctcctattgctgccattttccaatgtaaatctttgctcgagacgtgaaacccctttgcctcttttctagaccctgagagccctattccagtacaaaccccagaacgtggatgagctgacgctaagtcctggtgactacatctttgtggaccccacgcagcaggacgaagccagcgagggctgggtgattgggatctcacagcggacgggctgccggggcttcctgccggaaaactacacggatcgagccagtgagtctgacacgtgggtgaagcacaggtgagtgctgcctctggctgcagccccgtcatctctctctgagttactgtgtgagagtgcccacctgccaacagtgtgcttctagaccattccattattggtaaaattgcattctgtatgctgacaaaattattcctgcaggtatatagtaaacatcttggttcgtccctggttttctgatgataacattcaaaaaagaatgaattactctgcattagagtaatttgagatggtaatccccaaattactgcaaaatactacttctttatcacacacataataaattatactcagaggtcctgagcttgggtttatttattcttctgctccgtgtatgaaatgtaaagtcctaggtcgtattattagttttctatgactgtataataaattaccactaaaacaaagtgcaattattatcttatggtatttatgggttgagagtcagagtccagcttcactgggtcctcagctcggggtctcaaggctgtaatcaaggtgcctgccagggctgggctccccactgaggcttcacaccctcgcctgagcatacacagttgttggtgggagtgatttccttgaagctgtagggctcctggtgagttgcttcttcatcagctgaagaatctcttaattttagcaccttttagcatcatctggtgaggctaaggattttcagaatcatcagatactggttcttttttgttcgatgttcttccctcaatttatctctttcctctcccgcttcactataaataacatgaagaaaccaggtgatacacttaacactttgtttggaaatagccttagctatgtgaccaacatcatcgcttacaagtcctgctctccatggacaatttcattaaactctctggcacacatgggaaggatcctccttgctccgatttcctggaacacctgtcacattcctttctgagttctccccggaggattcacctttagcatccctatttcctctagcagtctgttcatggtgatttgggctttctctgctgtgctactcaaaagtctcttagcctctactcgctgccaagtcccaaagttgtttccacattttaagttcagaaggtttccaacttacaatggtttggcttaggatttcataatgttacgaaagtgatatgggttcaatagaaactgtacttcaagtgcccatacaatcattctgtgctacattttcagtacaacattcaacgaattacatgagatactcaacacttgattataaaatcggctttgtgttagattattccgccctatcataggctactgtaagtgttctgagcgtgtttaaggtaagctaggccaagctgtgatgttcagtaggttaggtgcattaaatgcattttcaatttatgatgggtttgttggaacataaccccatctgaagttgaagaacatccactgtttgttagagtagcaccccattcctgataccaaatttagtaaaagtttaaccagagatgcagaaccagtcactttcatacaatatataatacatataagtatatgtacagttgtcccttgctatctgcaagggattggttcccggacccccacagatacccaaatcctcatgttctcgagtccccgatataaaatgctgtagtatttacatgcaacttatgcacatcaccctgtatcctttaaatcatctctagattacttgtgatatgtaatacagtataaatactatgcaaatagttgttatacggtattgttttttatttgtattttttaaattgtattgctattttttaattgattaatcttttgaatatttttggcctgcagttggttgaatccacaaatgcagaacctccagatacaaagggctgactatacatacatagtattttatattatatacacatgtatcacacacatatatatatggaaaggtatatatgtatacacacatctatattgatttactacaatgaattgccttatggaattactggggctagctaagcaagggcagacaggcaggaagggaggagcctacttaggctgaaaacccatgggcaagctgaagcttgttgtccacatgtggcagttggaaggaccacccgggtgatgggagagcagtcacagacacagctgctattgaagtctctgagtgtgaggaaagcctaagtttttaaaaaaaaatgccttccaactgcataagtcagacctgctcagaataaccttgcttttgattaatttaagctcaactgattaggggttctagtcacatttgtaaaatctccttccagcagcacctagactagcatttgatgggatagctaggaaggctgtgtgtgatgcttaggatggctactgcctcccttccatcctccagctctcatgagaatgcctcttgtagcccaccctgatcagacatgtgctaaaaaggaagtctaggaactgtcgttcagtctggccaagttgccacaccataaagccattgcaaagtgttaaggtggctcttgtgagctttttcactctcttctcccaggttccagttaggagagtggagagagcaggcagaggtcagagtacacatggtgaaaaaagagaaaagctgctcagcctcatgggtgtgcctgttggggtggagctcttgcaggtgtcaagactgatggttggaacaactgaatgatgagagtgggaggagaagggcagaaatacacagaaaaaccctatgttgtggttctgggcttcctggcaccttcagagctgtgtggctggggaagagagcctggaaaaacaccatcgtggccatccctctgtctccaggcaggaggtcttaaaaccattttatatttcactcatttgtttaattctctcctaaaatgctccacagcttctctagggttcccctcaccaccctgacaaataaataaatcattaagttgaacacagatgtatcagcatctactcaatctatagattttcagatctgtgctggacatttgctgtggacttctatttccagcatctatacatccagggaattattttctgtacccttcctaatgagattcatgcacatggcaaaactatgaaaattgtgacgttttatttgagtagtcattaaaagctgcttaaaaattgtcagaggctatatggataagcctctgtgtggataagactagcattttaagtaaattaagaaagaacgtattttgaagagctgaaataaatgattgcatattggtcatttttatccaaacccccaaaaaagaaaagaaaagatggtttaatagtacctgatagaagctcttggtgaaatgattagaatttgcaagaaatagtagtaaaaataatggaagtattgtctgaaatatttataaaaggagatttggtgactatggctgatttctttaagtattatatttctttttgctaattattcatacactgagatttgtataacaagccagggacagtacctatgtccctgggctcccccactaaacataatagccacttgacattcaaggagagcagattccagccaaagccccacagctgtgcatacatgacattccatatcatcttctcttgaggccatttaacttcttaccctaatgaataagaacttaggaccacaaaatgcaaatgtgggatgaaaaatgcagccgtagtcacacgtctttatttattgatgtgttgactcctaatccacttaaatctattttaaggcagcttaagagatgtccaatagctttgcacactaacatcaccccctgtgcctggctctgtgccatgcatttcccttactaactgatttacttctccaataccccctggataggcacttttattgatccattttatagttgatgaaactgagacacaaagagatcaactcacttgcctgtgttcacacagcaagtgagcagaggaagccggattccagtcttatacctaatcccacgcttgggctttcaactatgacctcaactgcctatagaagagatcattaaaatttaaaaataagtccataaattaaattatgacacatccatacaataaaatatttgcagctttaaaataattaaaagggagaattttatatattgatttgaaaaaatatgcaagatttattgataaatgaaaaaaataagttgcagaacgatgtgtatggcatgatatacttgtgggggaaggggagagaaacacataactgtctgtaaatacatgtgcacaatatgtatttctatacatgtgtatgcctaaaggttccctggaagggagagtgtctagaaacttctaaccatggttaccggtgggtgttgggagtgggagccaggagaatggaacagaaatgggagggagtcttttcaaacacgaccatttcataatgtttaaatgtatgaagcatataaatgcattacttactcaaaacataaattaatccattttaaatttcaagaagagaatgtaagaaagctgggtcaaagggagagtaaaggtggaaaagctagacaaagccagggctgaggtttgtccataccatggcgtgcgctgtgagctcccagctccgagctttcccacatccagtgagaaaacagacacacattcaaccaacagtcatggccatcccagatgcgtgcagaccagcggttcaggagaaacacaatttgctgacatagacatgtccgtgggtccaggggccacatcaaaatcacaggatgtgggtgccacaagggattgtagagataaccgaaggcagctcccctgcttgagaggtgagaagactcgggcccaggaggccaggtgacgttgtacaatcaaggaagctcttgctttcttgcaagctcagttcaccacctgatccaatcaacagtttaaggaatagagaggagatgctggctatgccctaactaaccatctcaatttcaggagggttggggctcccctgtggccccgcatcatttagcatgtccttcgctctctgcccgggatgggagagtttcacagtcacagaggaaccacaaagactctgcagaagatgagtcagcggctatgatacttttcacttcacaattaatacatcagacacctgccatcaacataaccattccagcttttatgcctgacatttctgggactattctttccagaggaactttctcttgagaattaatcagtattaacaaaaattgcaatgaaaggaaagagaaataagcactgggctaggtgctgtgggttgtctgattggtcctgctttggaagcaccctcattgtggctgggggagcatcaagacaccctgacaagctgtgatctgtgcttatgggccagtgaggcagatgacgggagctgttggactccactgtgctggctaaatcttttcaaactgctgaaaatccttattaaacatctaaagctttcaaaatcggaaaatgatccttgaatgtctccacacatcactgacatattcattagtggaaaatggggtcagacagcaatgtccagaggccagctgacccacggactgacagatagctgtgcagatgttgaataattacttcctacgagccctggtcaggactcacacttgcacgatccaagcagcagaaccactggcattagagtgcctggaaacagacctgcaggcgcaccaggaggaatccccctgcccgccacagagggcacctttccaggtaagagtctgcagctctgatgaatagtacttgtcaattaacacaccagtcacccatcaccactataatgaccccagcctcagcctccgtgccagacggtgcagggattctttggacttatctaccgcaaaatcacactgtaatgtttgtccattgctttgaagatcagagatggcctggagagactggtgatggaggaccgtattcacaaaccacagcagcttccaatcctctgtccaggagagcagaggggagcacccctgtgggacaaacaacaggggggcttgagtgtgagggctcgggagaataagtgccatcccccagtcaagatgaggactttcccaacactgaagacagacacagcagattacttcaaaaacctcagagcaagtttacagcaaatatctcagacataagaaaggtacaattaagggctaaattgcattctgccaacattcatatgtggaggtcctgacccctaacacctcagaatgtgaacttatttggagacagggtctttaaagaggtgactaagttcaaatgagggcattagagtgggccctgatccaatatgtctggtgtccttataagaagaaatgaggacacagacacacacagagggacagcctgtgaggaaacgaggagaagtacctgtctacaagccaaggagagaggcctcaagagagaccagcctcaatggtggcttgacctcagactcgcagcctccaggactatgagggcatctgtggctgtcgttgaagccgctcagctgtgggactttgttatggccgccccaggaaatgaacacagggacgtagtgatgcaacccccagatggcagctatgtccttttaagaaccagggagaattcaaacacatctgtttcatggtgtaagttactgtcaagaggctctcttaagtcaaagagaaaaatggaaatgtgaaaatgctaagctcttttctttctccttccgtcacccatgttcacagcataatcttgattgtatttcatttgaaagactagcaaaatgcactccgtttctctctgtaaacctcacagatgtcatcagttgatagcaaagccctactgtctgcagagcgagccgcagggaggctgtgggtgccctcgccttgccctcaggaaggggaaaccaaccaatatttcctgtgctaatgtggggctatgaattgtgcctcactgctctgagcatgttaatttgaagaggaaactgtcgattgttccaatgagactatctatattcttggtctacttaggatcaactcaagtgtgcatttcctatctaatggcatctgacagcttgagaagatgcaaagtaaattggcctggacctgccatagtttatagatggagacagggcaggtaatagtgtgagaagatcatgtgtaacgcagatgctgagatgcagaagaaaagatgcccttcctggctctggacgggtctcggtggaggagtgggagctactgctggttttatgagaatgtggggacttgagacctctatgggagaaatgcaaacatttgcaaatgggctggataaatagaaacatgccctgtgcatggctgagaacagtaaactgtggtggtgtgtcagttcctcccagagtggatcaaaggggatggtgtattagtcagggttccccacagacagagacagagacaaagacagagagacagagagtgaccgagagagaaagagagagagagatctagttgaaggaattggttcaagactgtgagcctggcaagtgcacaatttgcagggcaggctggcagatgggagaccctgggaagagttgaggttacagctcaagtccaaaggtggtctggaggcaggatttccccttcctcatgggaccccagttcgtttcctcttaaggccttcaactggttggatgagacccactcacagtgatgtgtcgagacattcaaggaccattttctgatttaaaaagctttaaatgtttttaataaggactttcagctatttaaaaagattgagccagcaccatggagtccaacagccccatcatctgaagggtggtctctgctttactcagcctagtgacttaaatgttaatctcattctaaaaaaataccttcacagtgacatctaaaataacatttgacccaatacctgggtactgtggcctagccacgttgacatgtaaaattacccatcatagacggtgatcattgtaataaaacaaacacatcatccacacttcctgagtcctgagcactttgcacacgctacttcattttgtgctcatgggaacctttctgctgaggttgtcccggacattctcaagtacatacatgaccagatgctgggtctccatggcaacaacatggtctcacttctgttcaagccgtgctttccttcccctgcaggatgtacaccttcagtctagccacagacctgaactccagaaaggatggtgaagccagcagcagatgcagcggggaatttcttccacaaacggcaaggagtcttagcagcttacaggccttgcaggtaatagaacattcccttttttcttttaagtaaactaagcaaaactacactttgtattaacttcacggtggacacagcttcgtaggtgtagcttttgttccatagacacatcctccctgccctagagcgtggtcagcaagggggcctcccaggtctgagggtgccgggggtcctgccctggtctgtctgctctgggcagacagggagccaccccttcatggcagagtgccccaccttgagctcctcaaggcagctgaatcccgagttctcatcccattccctcattcatgagccaagaggtccccaagacgtcacctgccccggtgccttggcccctcatcttttgaggcaaaactctccataacctgggggtcagcagactcaggccagggtccagggcacagcagggcaccccgagctggccaccctcatggggcacatccaggagtgcaggctgccaggcagggacaccaaggagcaggcagcccctccctgaacgcaaacaagtgacatcacatccctgatccctgtcctgtgatctgaagcttcacactccttacagaggagccctcaggaaggggctgtacctgctgctggcctttgtctggttgccacagtagtgaaaatgcctctctgtccttgttcttcccaaattcgtccgcctgtgccctgccatgtgccgcacacgttactttaggatctctcatccttgctatccccaatcgacacaggaggcgctattcctgccccctacccattttacagatctgaaaactggggctcatggaggctaggaagcttgtcggagagcacacagactcctaaccaccctcccatcagattgttggaaggattatgtgagatgggccatccagtgcccaccacggccaggcccctggtgcggagaaactattgtgcccagagggtggggtcacagtagccaggcttattccctagtccccagggcccatcctggtgcctggtccataaatctccagaacaaccaaaggaaggctctgccgggacttgtcagtggctcaccctaaggtcaacgctcaccctctgttacggattgaattgtgtgcctccaaaattcctatctcgaagtcctaacccccagtctcactgaatgtgattgtatttgtagacaaggcctttaaagaggtatttaaggttaaatgaggcaacacaggtgatgcaatctgatccaatctgactgctgcccttataagaagaggggatgaggaaacagacacacaagagggatggccctgtgaggacacagggaggggacaccaccggcaagccccagagagaggcctcaaaaggaaccagccctggcaacaccatcatctctgacctccagcctccaggactgtgggagagtaaacttctgctgtggaagctaaacagtcaacccacacgcagcgtccctgtcgccatttgcacctcctggcagctggtgcaaatcagcccaaagctaagtggccttggcaggtctttgcagccttggtggctaggtgaggaggccttttcttgagaaatcaagaatgtgtctctgaagctgggtccatgagaaatggcgatcagcgttcaccatgtgagaaaggcccagacttgggagagccgagactccccagggctgtggcctggggattatttaaaaagctttaaatgtttttaataaggactttcagctatttaaaaagattgagctagtaccatggattccaacaaccctatcatctggagtaaaacagagaccattctgttttactcagcctagtgacttaaatgttaatctcatttttaaaaaataccttcacagtgacatctaaaataacatttgacccaatacctgggtactgtggagaagtacccaggtattgggtagggggagagcctggaatggaagtctctgctcgtagctcagcctgtgtctaaaccgtgctttcaatggctgaaaacagaacatgcatctgcctgtgaactggcccccctcacacggtcttctctatagggatttcaccccttccctacagtaagaaaagacaactggccacaggtctggtagaatcatggccccagagatgatgccctaatcccgggaacttgtgcatgtgaccttattaggaaagagagtttctgcagatgggattgagtggagggtcttgaaatgaggaaatgatcctgggtcatccaggagggccctaaaccccatcacaagtgtgctgatgagagaaaagcagaggggatctgatacagcagcagaggaggccatgcagccagagaggcagagactggagcaatgtggccacaagccaaggaacacctggggccaccaggagctggaagaagcaaagaataaattctcccctagaatgtcagagggagcatggccctgccaacaccttgactttggacttccagcctccagagctgtgagagaataaatgtctcttgcttggcaccgcccagcctgttatggcagccccaggacaccaatgcagcaccttctgtctagagaattggtgcagccctgcctcattccatagatcccaggggtcagtccattccactccccacagggctttcttttgctttatcatcatattcctgtggcaaagctccacagaagaacatttaaaatgctctgagctcttccaggaagaaaataccccaaatccaaaacttcagcccgcaagttgaaaacttcagggactttgttactaggcagaatgagtttccaagagcatgcatgctttgcaatctacttgcagatcagctctctacagctctctaggatgttttaatattcattctgggataggggcggtgggtgctgcctcttggtgtcagtgtaggcaacctctgcataaccacacttcacatgcaagagagcaagacagcaagacaaaccttcccctgaagctgttccccaggagatgcatgtttctatcctgaaacaaacaactgaagttttccaataagggaaagcaatactattcacttggccttaccgtatatccgttttgaagactcagcccagtgaccctaagaaagtgtttgcatggtgactgcaaacgttctcactggctcaccaatcccatagtttatgcacctaccaaatgtagccagggccaccgagaactgtctggtcctgataaatttcagcagctggaaattctgcatcgtccgggccagcgtggacttcacaagggatccacaggatctggcaggagctgcccgtggtgctgaccccgagaatgctttcaaggcaggtgaaattggcccccaccctactttctggtgtcccttccttcccagtagtttccaatcacttccctaggtacagggacaccacgggggaccactcttgccagagcgagtggccagttagtgcagacccttgagactggatcactgttcacagaagaaagtccagacaggaatgatcagctgcactggccaggtggaaaatgagtcccttcctccctgagggtgtttggatgttaaagccatttgcattttcctctctaggatttggagggaatcagggcgatgctggggctggtgtatgagggtttatgcagacaaggcttacctctcctcacctctcttccttaccctgctcagtaggaaaacacacacaagagctgccctctcattttagcccagagagagctgtgtggccaagagggagcagggcagggatagtgcctgtctgagctgcctcctgcccaggggtcctccctaccccgtccatccctggtcgcctgggctccaggcaggatttggtccccagaaggccccacagcccacctcccgtggcaggccgtgttcgctctgcccccaccatctctgttaatgactcatctttccatgttcatcccttggcccagggagacctgcagctccctaaagcagggatgctgtggactgcagcttcatggaccagcatgtgacatgctcccccctgcggtgccatgtcacagggaggttgaggcatgagtcctgggtgccagagggcagcaccactgggcctgtgttgctgcagggttccccacctcttgctctgaaatggacccccctggatagcctgggcctggctctggggctgggaatgtaggtgaagggccgatgtcagctggcacattagtgccctccagggaagcagccgagcctggtgtctccctccagggtcctggtgcagggcttatgctccacgcagctgtcctggtggcctctagctggctcggcccctagcactctgctctctggtcccagggggggcatcctcagctctcattcactctcttcatctcatttgctgtgggttcctctcaaggccagtccctcaacttgatcagccctgcacagcatggggagaagggtggcctagcccctgaggacagagccccccacaacaccatcccacacagtggaggcccctcccaaagggtagccagcctcgctgccccaagcatgacctttgggctacttccccaaagcacaggctccccagaaagagggcgggcgtgagccctgtaactgcaaggctccaaggccatcctgcggctgcctgaggctggggaggaaggtgccagagagctgctgtccctggctcgaagctgctggccaccgccaaggccagtctcatgccgagaagaagtaaataaactataaagtactgttttcctttagcattcagccaaacagagaatgaccagctatgggaaaacagcaaggggatggatgagggcttctccccttggtgctcagaagcagaattcatacctgggagccataaaaggacggcccctcaacaggtcaacaccagggcagtcctggagggtttctcagaagaagtgtgccagcaagagaggagactagatatatagataggtaatctatactataacaatacatattataatatagatagggataatgtcctaagacgtctctatgggaatgataaggacttagaaaagacagaaaagtagaaaaacggatgtgtcatgataggggccaatcctgtctcttttcattttcttgatgttagaatgcccagaaaataaaacattggaagaaattgaagagattgtcaatttcatgtcctctttcattctaatgatttgggcaaaatgggctgagctattgactaacgaaggaaaagattccctcgcagttgctgggtgactgggagagctgccattggtgcaagtccagtgagttggatgttaaactgcatgtgccttgcttcctgccccaccccccaggctaccgttgcaaggaagagcgtgctggtggttcgccacggggagagagtggatcagatcttcgggaaggcatggctgcagcaatgctccactcctgatggtaggtcacactcaggcgggtctacggacagaaacactgtagatctaaccaatgagatctccttcttaatgaccttacatggcaccagatcccctgaggcaccattctgtagaatgaccatgtgtagactgtatgtgtggaaaacgtgcctgctacatcttcctccaggggtgttccatgtatgcatttgagtgtctgtgttggaacctctccaacctaatcttaactgatgtaatttttggctatgctgcttaacagatggacgtattcttgaacatgcctcttgcacaccccagcttttctcctctgaatgccaggaagtaagaatagtgcttataaatacacatacccacaagccaacctctgtattgatgatcaatgtccacatcaatgctaatctcctaataggaagcctgtagtgtcacaatttctaagccatgacccattacataaattaaggcattgaatgtagtgacaaaatcaattcacagttgctaggttagccgaacccttttgggatccccctccagaagcccagcagacccaagaaagtggtaaatgagtagggaaaaccattggcagatgacaatcacacaccagaaaagattctgagcagataacatcatgatcaagcatatttccaagaactcacagagctaataatatggtcacctctataaaacaagatcaagtaaagatacaagagcttaaagcaacaataagacaataggtggctatcaggatgcattaacaaacatataagaaactttttttcaataaaacagtttttttagctattgaattactgaagctatagattgaactgacacaccttgtccatggtggggagaaccaatacaaaacaatcaacaccaaaaatagttattgaacttcatagaaaaagaaaaaatatttggtcatctggacaaaagatcaagtcacttataagggaaaatattttaaaggcactggaaatccccatctgaaaggaaactcctggtggatcttttcccaaggtagagaggcccttgataaagtgaagaattacatctagtttgtctgaattttgtatattgcagggtttaataaatcacaaggaggtatagccacgtcctcccccaaggtgaccaacctcagggaacacaagggagatttggggggctctactggcctctccccagctcagctcacttttggcccaggcacccacatcctcacagggcccctcacctcaccccatattccacacagactctgctcccatcaggacctgaccttgccccacatccttgtcctctcctgagctctgccctctgcccccagagtgatcacagctgaagtgtcaatgacagcaaaatacctaaatggagtgtcttgacattttagagggggatcacagatgcctttgagaacacaatgaaattgatggactttctctctgattttaaaactgcctttcccaagagctaatgttggcattgaataaacacctctaaaatgcagtgttcaaacaagagtctctgcccatggaaatcccagggagggagtcttcagaaaactcctatatggaaactaaaatgcaggcatgaaaaattgccccccgctgacccctgctgccccccactgccccctgactctgggtttgtgcaaggctgtgggccaggatgaaggggcctggcatattctggggtgcaaagggcagggcctgctatgtatggcagagcaggtctcaggaaggtcagtgtggctgctggaacctcctaataaccaggaggcttggggtccctttggagaatgtgaaggcaaaccagagtgcactggagggagcagtgtgtcgtggtgtcctgtgtgaggataatcagtcatcctgacgtggtgacatgagaccagtgccccgactcgttgaccactccctcttgagtcagactctgggctatgggtgttacctcactgacacctcgcaatcgctactctttccctgttttttactgataagagagatgaagtcatttatttctggctgcacagtgaggagatggtgatgccaggatttgctaccagactgtcagatcttagaactcaaggtcaaactccacgtgaaccctggcaccgggcagcctctggtgggagacagtcccagtgagcccacttccagcctggcttcaagcaattgactaaagaatgcacaacacaggcatctccagctcaagcactctgtcccctgagcaagaaggatacgtttaaagctagggggatggatcattgatgccaacttcagattcttaccgagttacactaaactagtcatagagacactttatcaggttcttcatcaggaaaatgtaagagtgaatcttcatggggcattttgggaggacaaagagggttgcatagttcctggggctgaaacctaagttgtctgcatttgagaaaatgttgtgtgcacagctgagcagcactttcttctcaaattgaagccacgttgcagagaatgttcagaaacaacacagttgacaataatttcaataataacattgctgttagagtgggtcttggtcttgggagttttgtggaacaaatctgtactaacttgatgaaactgaacgtctgatgcttatttatacttcagggaaatactacaggccagacctgaatttcccctgcagtctgccaagacggagtcgtgggatcaaagactttgaaaacgatcccccattatcatcgtgtggcattttccagtccagaattgcaggtatgtttgaggactgtctagtaggaaaggtaacaataacagcaacactgattatggctagcaggcatccagcctgagccctagctacacaccctttgatacagtgttagctttgtctccagtctgctgaggaggctggggcacagagaggttaagcaacttgcccaaggtcacacagcaagaaagtggcaatgtagaggtttgatctaggaatggatgattcaggaagttggcaggaatgaaagaaaggcatggaaagaacaagagaggggaggaaaaatcaacaaccaaggagctccaaggagctcacttttcaaatggaaaaccacatcctctcattcgttggttttatttcaaaatctgtcactttgggcttttgtttcatgtctggcggttctgcttctacgtgactgagtttatgtaaacagaagagaccattgagttcatcgagtcttcatttcctaaattcagaaaatggaatccagagaagcaagttacaccaatggttaactgcagagacccccacggcccactcgcccagggccccactcagaggtgtgctcagaaatgtttacccacctgctccaggcagggtgggaagtccgagttatagagttatagagttagttatagagttatagagtcatggagttatagagttagttatagagttagaatcatagagttatagagtcatagagttatagagttagagttatggagttatagagttatagagttgttatagagttatagaattatagagttagttatagagttatagagtcatagatttatagagttatagagttagttatagagttatagagtcatagatttatagagttatagagttagttatagagttatagagtcatagatttatagagttatagagttagttatagagttatagagtcatagagttgtagagttatagagttatagagttatggagccatagagttatagagtcatagagttatagagttagttatagagttatagagtcatagaattatagagttagttatagagttatagagtcatagagttatagagttatagagtcataaaattatagagttagagttacagagtcatagatttatagagttaattatagagttagagtcatagagttatagagttatagagtcatagtgttacagagttatagagttaattatagagttatagagctatagagtcatagagttatagagttagttatagagttatagagctatagagtcatagagttatagaattagagttatagagttataaagtcatagagtcatagagttatagagttagttatagagctatagagttagagtcatagagttatagcacttgctgagtgcagtggtgagaatactgcactccccgacaactgattccagactcccagtgtgagctcccaggacactgagtcgggaggagatggtggtcccaggcctctgtccctggcttgcaggtgacattttctgtcttcctcttctcttctctgcatgtctctgtgcacagatttccccttttagaagggcactgtcacactggattagagcccaccctaatttaattgattgaggtgcatacccttattttaacttatcactctgtaaaaatcctgtttccaaatgagtcacattctaaggcaccaagggtgaggactctaacatgtttttcaagggaggggatacagttcaacccagaagagcctccactgaaacctcgctcatcagctttcaggctgtgcaatttttgtgctgtagggactcccatatttccctgagagcagggcttccagtatcacagggggaaaggcagagtacaggcttttccttccacgagcttcagtgggtcttgagttttctcaaacgaccacaaatgtgaagccccgcccatttctgagctcacagtggtgcagatccaaagcccaggcccacgaggctgcttctctgctgaaggtcttaaagcctgaagtcaaggtctctgctgggctgagttttcattgggagctcaagtctccttccagactcattctgctgttggccaaattcagatccttgcagtgggaggactgaggtctgttccttgctggctgttagctgggggctgctcccagccctagtagaggctgcccacattccttgccatgtggtcccctccatctttgcagccagcaatggagaatgttttgctgaatccttctcacttcacacttctctgacttttttccatgactggctggagataatcactgcttttaatgggctcaccaacttgtcagccccaccttggatcccttcccttctgccataggatgtaattgtcccaggagcaacagatcattctggtcatgggttccacccatacttggaggctgtgcagggtgtgtcacaccagggggtggaaacccggggccctttgaggaccctgcctaccacagggagcacatggctcatctgccatcagaggctagaattatgaaggggcattttctgcctttttcactattttccaggggacgcgctactggacagtggtatcagaatcagctctgtgtttgcctccccagccctccgctgtgtgcagacggccaaactcatcctggaaggtcagtgagaacctcggtgagcctctcctactgccttgaccttggggctattctccaaggggagtgggaagggagtggaggtggaattggatgactggcaatgaatgcccacaccaaagtcatcaggcaagtacgagccagccctccaaggatgctggcaggcatgctgggtccgtgagcgtgtctggaataccaggaccgtcagaccagtaggggctggtgtagctaaatgccagggcctgtcctcataccgtttctctttggcctccgtcagctaggcatttttaaaatacacctggaaagcggcattcgaaaaccttgagagctgggaactgctacggttccttgtaagtctgaattgcatgacccttcccagggcaatgcactgggccagtggagctgtccagcgtcctcaagggctgatgtgtgtcaggaagtcctgggcagacccttctgcagctcccatctacgggaagaagaaagttcctgcccataggagagcagcttgttccagaggcctgggctctgccttcagcctgaaccctgtcctgctcctctttgtctgggaagagggataagatctcggtccccaggcagggactggccgtggccaggagcatgggtgacatgcgagagagcatgtcgcctccatggtgacaagggagagggcagagcacacagacacagatgcagcaggagggcaaatgtgggggacagggcttgcctcgactttctcagagacctaggaagtaaggccaccagcggaaagtgggggcagggactgtgggaagtttggggtgcgccgaaggaatgaatggctgtcaggcagaggggcccaggacatgggctgggagatgcagagtgaccgctgggcagcactcagagcccacccacagttcatgagcatgagtttaaatggagatgcatcagccgggctagggggtctcttccagcttagaccgggagtaggtggagagtgggatgcaggtaagggcagggttgagctgtgagtacggtggagccagaggggacaggaagacttgagggcatagtgagggggtgaccgtgcccatggactttcagctgggtcagcgaggaggccgagcacgggggaggtgagtgcaggagaaaggaggtgatctgagtgaggctcaaggtccacgagggggctgcttggagacagcagagtttggcactgcaccatggcggggctgcagtggctagaatgacaagtcccaggtggaaggaatggatgctcaaggcagggaggaagccacgtcctgcaggaggtgggcaggaatggaggggccatggaggagccatcccgcagatggtggtcttgctgggacttgcacatggggccacatcagagccggggccacgaggggccgggaccttcacaggaggagccgttgggacagcagtggattcaatgcacacatgtgcattgccggttcccatgtcctcagatccccttcgccccgtcagagacgctccctcagagcaccttcaaatccaggtgcccaggaagccccagccaggagcggacctggttccaccccggagcctctcaggctcatcattcctgtcctgtgctctcatgaactttccatcccatagtccagtcctagtttcacgaggcacagaaatccattgtatcagcatggagcatccacgatccaccttccacacacttaaaaatgtcaagacactttctgcccacctcagtcttgcagcttcatcctttcatttcccacccaactgtggcacaggaccccacccctctgcacggcatctcgggtcacaagacagaaatgcagacttacttcactttgccttggaggttcccatgttgattgcatcacggcacctctgggctctcaatgagccagatgaagatcaaagaacaatatcagcttctttgaccaaaccacgaaaggactcgcgaatccccaaaggcctgacggcagtgtagccggaggccagaggcagctccacccgagggcaagcaaggcttccacaatccttgtctctcctcacaacgctggcatgcacatacacagcacacacatccacacacaccacacacacaccacacgccacacacacactacacacacccacacacacaccatgcacacccacacaccacacacacccacacacaccacacacacccacacacactacacatacacaccacacaccacacacacaccacacaccacacacaccacctacacccacacacacccacacacaacacacaacacacacaccacacacataacatacaacacgctgaacacacataccacacacacaccacacacctcacacacaccacacacatacacacaccacacacacgacacacaccacacatccacacacacaccacaccccacacacacccacacaccacacacacaacacacacccacacacacaccacacacaccacatacaccccttggggtttcacttgggggctgagtcacagaccgcagaggaggaggctgtgatctttgagagccatgaccccagcccaggtgacagggtcccgcgatgtccgcctctccctgttcccatgctcacagcagcaggtccagccttcgtgttttcaggaaggcctgagaaacaggacgtggcctttccagctctgcgctttgggagggacgagggtggcaagatcagaaatgtgaaggggcagggtctccgagtatctggggacccttcagtgtgagggtggctcttaataactatgatggaataaagcaaaattgatatatagcaatttcatccctggttgtttaggatcaatgtatttataattaaccaaacacctataatcataagatgtgaaccaagcaagaaatgcacacaaatatatgacaagaggggaacaggcctgtgcctcagtttcccctcttctcccctgtcgctggtctttgcaccccaccactcaatgagcgcattttgttggaaaccacctaagatgctgctgttcttccactaagtttcagaatcactttggtttctgccactggctggccgcccactagcaggccgtgcgagagtccccaggtcgcctgtgcctgccaggccagcaacaacagtctcctctcactggggcttttactgcctcagcctgcaagtttcccttctagtgaaaaccttcgtctttctttccctacccaacctctctcaccacgataacaacaacgaataaaaaaggaatctcttggccagcctttgtaataaaagaatacgactgactgaaaacacttcataattttatcttttttttgtcattgttcgtggttcctcattaacacacttattcccatttttggtggatttttttacttctattatttgggtcacttgcatataaaaagctttcaaaaatgtcttttgccagcaataatgtcaaaatctttaatgtgatctctcagtgacctttaagtgcagatgatgatgatggtgatgatgatggtgatgatgcctgtttaaagggcatgggtttataaatcctctgttaattcagaaaaacaaggacacccagtcttctttacaaggcctcagacatgatcaacctgcttatcagatggtgtctgagatgctaaggtgctcaactttgtttaaattcaatgtcagagaatgtccacatgaaccatttcacagccaagtccacaaaacactggcctgcaagaggtcttcaaaggaaagagacccatggccacacctgtctgggaagctctcacactgttccttcatcttatttgttcacaatggaaatgagctcttcacaggcttgggggagatttcgggggcctggtttatcagggaggacttgggggcccagttgatgggggaggactcggggacctggttgatggaggaggacttgggggcctggttgatgaaggaggactcgggggcctggttgatgggggaggactcaggggcctggttgatggaggaggactcgggggcctggttggatgggggaggactcgggagcctggttgatgggggaggactcgggggcctggttgatgggggaggacttggaggtctggttgatgaaggaggacttgggggcctggttgattggggagaacttgggggcctgattaacttgctttaactctcttttctaagcatgcttgatgaaagagctccttccatggacctaaaacacatttgaggaactgattttatgtccagcatttgagttcaatgacatcttctccattcccagtgaaaacattcaggtctttttttccactcaaaaagagatggccttactttatggctcttcctttaatcaaaatataaaatgcctgggaaatgtgagttgcagggagtcagaatattccagaagatggctccttccattcttcacctcttgccccgtctgtgtaagtgtttatcaggaaagtgcctcatgaggccaacattcttcatgatgggtcacatcttgtccattgatcattggatctgccatgttggaggatgcagccggtgggctggtttcacggtggagctgtgctgggtgatcaggtgagccccagcctaagcctgctgcctgggacactcaccagctcctggaagactctggcccttcctggcacacagggggccatcactcctctgataccttcccactgctcgtcagttttgacttcagaaatagcacagctatgcctaatcacagaacggtatttgccaagaagaaaatcacactgtttaaaaggcatgatttagacgtgtgtgtgacggtctgagatctaaaaggagacttatttatgcaaagtcagggtggatgttgaggatgataaacacttgtattctgttgaatccagaactcaaactggagaaaaaaatcaagatacgagtggaacctggaatctttgaatggacaaaatgggaagctggcaaaaccaccccaaccctcatgagcctggaagagctgaaagaggcaaatttcaacattgacactgattacaggtatgctgttctaaagttctctgccactggggcttttccagttattgttaaagaaaaatttcatgacactgttaaaatggtaagaaagactttattcaagagggaccactgcagtggggttttgcagcaggggagagaggtggggctcaactcctaatacaaggaaaagaggggagttatagccacagagcagggtgggggtcagtggatggaaaattcctgagaaggtgggtcattcttgctaaactgacctaaatggagactcttgctgaaggcaggccaaggtgatcagacatcacctggggggtggtagaggataaggaacttgatcagatgtcgaaggtaggaggttcttgctaaactcactctgcaagaacagacacagaagcccaagggtcaagacctcattgagaagaaggttcagaggagctggactggagtttagtcaaggagagagtctttgtcattctccacccatgtctgactctgccatcacagagccctcctggtgttgagtaagaatgtgtgctggagattgactgtcagtgctttgccagttttcagcacaaaactggagcctgcctgttgaccatgagcctgccttgaggcagagccatcctggaagaacgttctccttccccagctaactgcagctgagccttcctaatccctacgaaagtgccagggcagcagcctctccttctcatccttccaggcccgcgtttcccctgtccgccctcatgccggccgagagctaccaggagtacatggacaggtgcacggcgagcatggtgcaaatcgtcaacacctgtccacaggacagtaagtgcctcaccatcctcagtatgaacagcccctggggcttggggaattatctctgagatggaaattggccaattttctgaacctatgaatgcccctacttctcctgcctgcccccgcccccattctccagcaacaaagttttcatcactgctgctgctgctgcagtaaccgggtgcacagacacacactcccctgccgcccaggccctgggaccccccatcctgggactgagtgctgatgggaggggaatgatctctgagatggaaattggccgattttctgaacctatgaatgcccccacttcccctgcccgccccccaccattctccagcaacaaagttttcatcactgctgctgctggtgcagtaaccgggtgcacagacacacactcccctgccgcccaggccctggaaccccccatcctgggactgaatgctgatgggacccaggccagcagggtcacacaatccacccatgtccaagggatttgagtcagcttcctgggaaacaaaagagacagagagagaaagaacaaccaacttccaggtggcgcccccttccctgacccatcacacgggtctcctaaccctcccgtgttgctttgtcctggatgaagcatgcacagaagcgctgacttcccacgccttcccctgagctggcagggacaagcgtgtctcctgagggagacccactcggcctgtggtctccaggtgttcttatctaaagcaggagtcgtagcaggctcgtgtgacaaaataaccggctgacctttctaaagtgaatcaggtctggcttgggcgtcagccaccgctacatcccagtctgtggctgacggggcccaggcagccagcgaccacagggggtggctcagctcacttcctaggcctccctgaggctggtgggcagctgctgcgtgcagaggaatccatgagcgagggtgggacgcaggcatcactgagcggttaccagccacactacttctagcccgggggtctcgccaggcttcggggcactctgagatagctctgccccccaccactttggggaccccagtctaataaaaggtgctctctggggctgctttgacctggaggtgttcttgttttccacagcgggtgtcatcctaattgtgagtcacggctccactctggactcctgcacgcggccactgctcgggctgccgccccgggaatgtggggattttgcccaactcgtgagaaaggtacgcgcccactcttggctctttgggccacaaaatcaagcatcccgaagacacaggtttatctcatccacttctcggaatgaaaacaagtgtccggctgacccagggccaccaggatccacgtgcccccggagactgtgcccaccggctcttatgcgaagggtgacttcgggctggggctggtggataggtcagtcaacctcatcatcattggccacttgccaactttttaccagtcagctcatgccatgaccccttgcagctctcgtagaaaaacagacggtccaggaaggagtaagcagtttagatgaggagggaagaaacgactgtgggactcgattctggcctcttctggggacctggggcagggcggctgatggatgaaaaggagccccttgatcctcttgcccttggagtcacccagcatggaagaagcttgagctggttgtagctgccagagtgctcaggctctggcaagggccttgtgaatgacaaacagaggataacgcacacgtgacatcttggacaaccttgattatcactcagcaaagccagagggtgatgtccagtccatgggtgaattgaggcaggcaaactcaggagtgcagatcccaccccagtcccagcccttccctgcagatctactcaaggctggactcaccacagtcctgacctttttatgaaattcatcagtccactggtcagtgcccaggcagcacgtgcagcatagacaatgcctgtcatcggaggtgcttgaggccctgacctggtttcttcacatagcactgccacaggaccacactggccacagcttgtttgccataagttgtgggcagcagtgggggttgctgagtccccccaagaggtcaggggcttcagaggagcccaactcccgggcccagcccagtgacaccagccaggtgcctgcaggagggcttagctctctagctacgcctgcctcagcagccagatgagaggttacgcacatgaagagcatgcctgccgtgggtcattgtcactcagcaattaggcatcagacacccgaatctccctttcttgctccattttcctctgcacctgagtagaaacatgcttcccctgcaaaatgtctccagggtggtgtgtcccaattatgatccagacatttccgagcgccctggattcttgagccaccaggtgagcattgtccaaatagggcagctcaacccccctgggccacactggtagaggtctgcatggattttcctggggactgtccggggcagccccggcaccacctgctcccaaaatgttgctcttgcttctgcaaatgggtctcccacacatgcgctctgatgcattcctcctgtccctgccccgcttcccacagtcccatatacacataccaagcctccagccccaggcgctcctgggggcccacgtaaccaagggtggcagcactgcacacaccagctgctgacagttcctcaaacccatgagcctttgtggccaaagctccacccactccttggacccttcacccccttccatagatgccaatcttgaacttccaaactcctggactttcttatgctggtcacgtggcgttcaccctgcccctaccccaaaataagctggacttgctcatgcatatcagaaaatacaaagggggggctctaccaaatgatgggcccccaaatcagggcagctggaaagggagcactcaggaccctccccgaccagcccatcaccgcccctcgcccacagcctctgcaagcgtgaggaaagaatcaccctagggtcaacaccagcctcactcagacccccctgccagttggcatttttgtaaatttcatctgcctgaggaatttctagacattagaaagaggaaggaaagaaagaaaagaaaagacaaaaacaaaaaaggcttcaccacaaagctctgttctcacacatccatttcacagatgaagggatggaggtctaaaggttcactttgtgcttttcttttgggtctgaaaactcaatgtctgtgtctttttgtgatgctgaatatgagaatatgagtcactccttaagtggtggatggcaatctccacctcagcctgcagacctttgtggtgggggctgttctactcattgtaggatgtaccaccttgtaggacctctacctgctaggtgtcggcagcacctccatcctcagttgtgacaatcagaaatgtctccggaattacccagtgtcccctggctaggggacatcccccacggggcaccgccagggcagatgttggtgccattcaatggtggcagtgccagcctgggcagtcgcagaccctccaaagtagaggtgtgcctgacagttggctttggagctagtctgaaattgatggacttgctataagatattaacaagtgatttaaaactctgttccagatcccttccctgggcatgtgcttctgtgaagaaaataaagaggaaggaaaatgggagttggtgaacccaccggtgaagaccctgacccacggggcgaacgcagcatttaactggaggaactggatctcaggcaactgagagccacggtgatgttgtcataacctcagagtggagaggcagaaaccatgtgcagaggctgggagatgctgctgtttccagaggcgtcttagtctcacccaatgtgatttgtagaagcacgagacgcacttttatatcccggaatatttccctccggctttcgcctttgtaactcccatctgtggacccatcgtccaccagcccagctgcggggagcacagggcaggtggctgggtgaggatgccgccctgcagcatgtacaccgagtgtctgcagctggggacacaactgcccgggactctaacttccaggaattaaagactcaccacacacgaaggatctaaccacttcattttccatggtctaatcattaaattcccaatcgttttttctttttctgggtccatcactctttagccatatccacatgggctaaaacaggtgtaatagtcaataaaatggtcccagaaaaccatcgaccaggtcaaaactgggttgctgctccgtgctgtcaacattcatgttactatgtctctgtggttgctgtaaccaatgaccacaaacctgggggtcatggaaagaacacaaactttacacacacacacacacacacacacacacaggcacatacacacatgcacatatgcatacaaagacaggcacacacgagcatgcacacacacaaacacgtgcacatacacatgcgcacacacatgcacacgcacatgcacacacacgcaggtacacaagcatgcaaacacacatacacatacaaacgcgtgcatgcatacatgcacacatgagcacacaaacacatgcacacacttgcacacatgcacacaaaggcatacacatgcaatgcacacacacaaacacacatgcacacacaggcacacacacgctcacatgcacacacacacacgctgactctcctacggttctggaggttggcattttctcagcaggctatgtttcttctggagcctccaggggaggatccttgccttttctcacttttagaggccacctgcatcctccctcctcaagtacagcggcgtagcagcctccaagctctctcagtctctgccttcacagccacatcgccttctgcttctgactctcctgcctccctcctacaagggcccttgtgttgacactgggcccacccaataacccaggatcaattctcatctcaagagccttaaccacacatgcaaagtcccttttgccacataaagttgcatattcccaggtcccggggattaggacatgaacatctttgggggttatcctgtagcctgccataacataccccaatccttccaagcacagcggagctgcccgtacagggcctcggacatagggatttgagacactccccttgcaggccttttttggcttctcctattcttgtttctgatcacgtagaggagagaagaggactttgccagtgggagaagtaggctcccccgatttaatggggccccaaaagaagggccacgagcaaagtggagtctgtccatgatggtgatgctgaggaagctggtccagcaggggatggggtctccccagtggggagtctcatgccccagcccacaggtcacacctgctcccacagcccacacatgtggtgcctcatgctgcaggcagagatcccagcacggtgtagtgacagtccatcggtctttcatctcttctagccccctgatccagtgcaggtgttatttcatgattgcagtttggggctgtggtggtggctctgtgagtgccttttatagtgtgaatgcagagacagggcaggaaggacccatgctgcaccctcagcctcccctgtgagcacccaggcaagtggagggcagaacacaaagggagctcttgtagaaataaagatggtgaacaccccgggctgtgacaaaaacggcccacattgtgtagaatgcacaggaggccagacccaataaaagtttccttgctgttttagtcaatcaaacacgacctcctgagaaaaagacgcatctgtctgtcccttgttttatttcactaatgatgtagtttttctgtgtccaaacataaagaagtttgaagttgacacagccacagagagcagagcatgcaccccactcacaggcctgcttcgagtccaggccataccgaaatgacgtcttcagggagattgttctagacgcatcccagcagataccgactagagaagagatggattcactgggatgtaggtggctgggcagtacgtcctgcaacaaatacaccccaccgctgggcacctgggtggttgttctttctcctcggcaagtgtgtggttgggtccaagtccctcctggataccacagtgccacgctcgctaatcatgatgatgaattaaagtgctgcaagtcaaggtatggcattgaaatcacagtcacgtgttcaggtggtctgtaatgaatctctggattcaccttctcaggggtgaagcttccaggtcctccaccctgggcaaagccagacacaggtaattcccctctcatcctgctgggctgctcacaggttttgcaaggagaatgagatgggtttgaaactcagatctccagatctccagatctagtgtgcaagaaatagcattttctcgatattctatgcttctggttctgtcagaccctcattccacccccaaggcagaggaccccagttcagtggttctgttcctccagaaggaaccattcgctgtatggactgagccttgcggacagagctgggctggaaaagggcagagacggaaatgcctggtgggattatcatgattgggtgtaaactgtctactctatgaaccaataggaaatcccaaaaaaagaaaacaaaagacactcttttttccttcctctccctgggtgggtcgctttggtgtttgtgagccaagtctgacccctgctgacaccgtctggaagtggacgtcctgtcaccaacgccatcccaacccatgccccacccacattctcttgttgacttcctcactgtgtgcttgaaaaaaaaaacaagcctgggccaggcatggtgactcatgcctgtaatcctggcactttgggaggccaaggcgggcagatcacgaggccaggagatcgacaccaccctggccaacatggtgaaaccccgtctctactacaatacaaaaacgtagccaggcgtggtggcgcatacctgtagttccagctactcaggaggctgaggcaggggaatcgcttgaaccagggaggcggaggttggagcaagccgagatcgcgccactgcactccagcctggcgacagagcaagactccgtctcaaaaaaaaaaaaaaagaaaaagaaaaaaacaagcctgaaagggaattctaccagcgttccctgaggctgagcggatgacaatgttgttttgcagcttaatgttcccctccgagacctggttctttggaaagatggaaagtggtgagaagggggcggagccggcctcaagctgggcagccaagggggccaaaggcctaagccagtgcctgtctccaggctgcagcctgtggtgctgaagagcttaaggacaggcctgggaccaccaagccaagcactggccctggcaaacactgctgcactcgtctaagaagaaagagctatcataaccgtccaccaaagtacatcttattttagaaccaaatttgagacttttttaaacgtgattcatattggtgcatattatgggctgagttgaatgctccctcccccacccaaattcaaccagccaacaattctgcaaggatcagaagtcggaagaaaggaaaatggcagcatcgaatgcacagccacaaatcccaagaaggccccaggagcctgggagtggctgcggaggaatttagggctggatggcccacaggacatggtgagaaccactaccatgggctgaattgtgtccccctgaaaagctatgttggagactgatatggtttggttctgtgtccccacccaaatctcatgttgaattgtaatccccagtgttgggggagggaccctaaccctaaccctataaacatggtattttttatatcctcatatcctcataccatatttaaacctatggtaagcacctgctcttccacaggaacagcagataactggaaatcttagaggccttcccagaactggggttcatcagaacatgggtggctcctgacccatcactcccagacccagagcttatgcaccataggggagaggtggttcagaagggatgtgcaggacaactaaagtacagtaacatcgaggtcgcttgacctgagggcaggacctatggtaagtacctgcttttatgtaggtatatacagtaaagggagcagtcatagcagtgggggaaggaaggtgattaaataaatgacactgggacaactggatcacatttggggaaaagaaggttggaatcactcctcattcctcataccaaaaaaaaacatcaaagatttaaatatttaaaaaaaaagaaatcatgggccgggcgcagtggctcacgcctataatcccagcacttgggaggccaaggcaggtggatcacttgaggtcaggagttcgagaccagcctggccaatgtggtgaaaccctatctctactaaaaatacaaaaattagccaggcatggtggcaggcacctgtaatcccagctactcaggaggctgaggcaggagaatcacttgaacctgggaggcggaggttgcagtgggccgagatcacaccactgcactccagtctgggcggcagagtgagactccatctcaaaataaataaataaataaaaataaaaactatcatagagttaaaaagtaaaaggtaagctgggaaagctctgtgcttctcatgccgcccagttccagcccaccccctccaggaagccctcctggccgccagcccaccttgctgcccctgaatcccagctcaggcgtcctctgcacaattcatgtcagtcgtgtctgccttgtcctgttgttgcggtctctcatcgtcttgtctgtcactccttcccaggggttgcaatagtgaccgtgtgccgggcttccaggcagccccaagtccagtgggaccagtgacccccctgcaaagcttctctgctcctataggccaggatttcccagccttggcactattgacatttggggccagatacatctttgtcagaggacgccctgtgcattgtgggatgtccagcagcatccctggccctcccctactgaagcagcagtacgtccctcaccccagcccaccagttgtgataaacaaagatgtctccacatgctgccaaatgtccctgggggagcaggatcatccccagctgagaagtaccgatgtattcccttcacaggtctgcatggaaccctggcctcagggctcccaccagggcactcaggcatagcgcgaatgggcacaggtgtgttaggagtctggagtcgcacatgtgcactcctgctgagcagacagacctttatggagacgaaggttggaaaggaatcggtgcacatctcgagctgaacacttgtgtgatgctgctacggaggaagtccgagcagaactggaactttgcggacactgcccctggacgtaggtgtgggcctgggcagggggagccacgcggaggtgcgaccaagtcctgcacggacctcactgcctccgtgtgatgtggtggctgtgctgtgagggcagctgagccctgtgtccagcctcgtagtcctcttggctggccccacactcaaattctagaacatttaagtgcagtgcaccgtggacaccacgaggctccacactgttggactccagtcctttagcccagctgggagcagccctgacacaataattcttcaacagaggcttctccttaaccctgtctcatgcttctcctctcccctcatccccaaggccgacagatggtggctgcacacacattcaggagattgcaggaaataatttccaacagcaaatgagacattaattattcaatgcagataaacatcaacaacagcgcttcatccaaaggaattccactgggatccaggggctctgagttggagcccagttcggtcctctactcatggtgacctcagacacagtctctgtgtctcgggctcactgctgtaaaatcatgcggcctgtcgatgggtccatgtcacttgcagcatcttagtcctcattctggaggacacgtgccctcttagcagtgagccctggaggggctgactcgcagtgtctgctgtgttttccagtttccatgatgtaaatgcaccagggctgattctgggctgccagtgttttgacaattgatttgcagactgcgtgaaaatttaaaactcagctctcttgagctgatatgagccaccccagcccacccctgcagcaggcacgaacgttagtttgcagggagaggccagctgagctgctgcacagacctgctgggatcatcacagctgtgcgcttcaggccagtgcctcttcctgtaaaaggaaacaacattctctctacagaggatggaaggacagaagggctgaggcccatgtgcaggcggggtcaggagagagaggaggccaagtccctgggtctaggaaagacgggtgggtggagccaggccaggggcactaagtggaacgctgtctgctccctgcggagcactggacagacttttggttccagggattcatcccgagctgtgtctcttccgggatccttggccagcagcgactctggcacctggagcacacctgaagagagcccccaagctctcgcctctctccagccctgctatccaaccagatgttcccactcctgctcctccctgcctcatcgcctcagccgcccggggtgagccacctactctcccaaggcaagacacagccggcatgcttcacacactcaccttgaagttcagggttggaaggtcagtccatccagctgaagttcactgctagagatgtaattgaatcagccctggcaggagcatttggaccacaggaataggtaaacacggctgcgagtcagcccctccagggctcactgctaagagggcacatcgtgtcctccagaatgaggactaagatgctgcaagtgacgtggacccatcgacaggccacatgattttacaacggtgggcccgaggcacagagactctgtccgaggtcaccatgagtagaggacggaactgagctttaactcagatcccagtggaattccttcggatgaagcgctgctgttgtttatcagcattgaataactaatgtctcatttgctgttggaaattatttcctgcaatctcctgaatgtgtgtgcagccgctgtctgccggcgcgtggggggttcttcatgaaaagtgagaggggtccagctgtgtgaaaggcctttgcaaattgccacagcaaactcccagaattatgatgtacttcttcctgtgtggttccaagtaaatgccacttccggctgtccagtaccattttttcctaggacttaaggccacaaaaatggattaagaaacacacatgtatacatgcaatcttcctggtgaagtcttcaaacaaagttctccaagaagtcattaaaaaattaatcatctggaaatgtcatgtttctccttctctctccaaaatgtatttctttcaaccattaactcattctctttcattgtgtcccatagtgagacaaaactgtgttaggacaataaaccaagcaattttccaaagaagctatagcacgaaagcaacgtaaatcccgaaggagaaacgcctgcgaatgagctcaccgaaggcacactctcctcccaggagcctccccggagaggcagcccgtttatttgagttagtgattttggaagacacactgcactttctttgcctccagctatccttgagccattttgttctccttgcgaggtactgatagcacttattatctagaaaatataaccagactttgaggagaggcaaggggccctataaattatttatttttttgcttctcaaactctggaccgaggaccaggattacaggcattgcctggaagcttgttacaaatgcagggcctcaggcacccccgtctccgtgtcagcagctgtgtcttagcaggatccccagggcattgcctcacagtcagggtggtgcaaaagtcccgcctggcatcctggtgagtggaccaggagggggcaggtgaaggcgatattattggtccttcgactccagacaagaacttgcagcttagcctgaggaaagaaattagcccatatgatgaaacacaatctgatgacgtaaggatttttgtacttatgcccacatgtttagacatggcagcccgcatcctcttaaacctgaactttaacataccgtgacttagagccacaaacaacaaaacagagggcaggaaccagagttctccagagaaacagccagtgggaaacaggacccacatccatacggatacaaacatacagatacaggctgggagagggaaggagagaggggcattggctcacactcttacagaagctgagaagccccacgatctgcgggagctgttggcctcccgtctggaggccagtaggctcgagacccagagagaatcgatgttttcattcaagtccaatggcaggaaaaagccaatgcctcagttcaaaggccgtcagacatgaggagtttcctcttagccttttgttccattcagaccttcaactgattggatgaggcccacccaccctggggagggccgtttgcttgacagtctcctgattcgaatgttcgtctcattcagaaacctcctcacacacccccagagtgacactgggtcaaaacgtctttgcaccctgcagtccagtcaaattcacatgtgcagttgagcttcacattgggcatttctgccctggtaatgtcctcccattaccaaaaacctggtatttgtccttcttttcagtgggtttcacagcccagcagcagctggccctcttgtagagcagcagttcccagccttttggcaccagggacaagtgtcgtggaagaaaatttttccacaaaccagggtggggtgggggtggggaatggttttgagatgattcaagtgcaattacatttattgtgcacactttatttctattatcacgttgtaatatataataaaataattatacaactcaccataatgtagaatcagtgggagccctgagcttgttttcctgcaactagacagtcccatctgggggtgatgggagacagtgacagataatcaagcattagattctcataaggagctcacaacccagatccctcacatgcacagttcacagtagcgttcacagtcctatgagactaatgccaccactcatctgacaggaagcggagctcaggcagtaatgagagcaatggggagtggctgtagatacagacgaagcttcacttactcatccacccactgctcatctcctgttgtgcagcctggttcccaacaggggttggaggcctctgttacagaggaccctctcctgaccgccaatgagacccatgagctcaccgtcttgtctgcccttccacagcccacgctccctcctcagcccacgccccctcctcagcccacactccctcctcaggctcagcactgggaagagttcgtccttcctcacctcagccctcaagtgtggagtccggcgcctcagtcatccactcaacagacatttatgagggaatgtttgggtgccattaacactgctgggaaagcagcagtggatcagatacaagctcactctcaaagagcttatatttcagtggaaggtggtgagcaatggactaataagccagtgaacacgtaacacctcctctgccaatacgtgaggtgaagagaagacagcagagagggggacagaggcggaatacaaatgttatgttagcagtgaacaatcagtaagtaaaataaaaacatcacttatagtagcataaagaaaccagaagcaaaagaggatgtactgcatgattcaatttatatacaactatttagagacaaatccaatctgtggtgacagaaagcagcacatcagacgcttaatgctgggagtaggggaatggattgcaaatgggcacgaagatattttcaggctgacgggaatctgtgtgctgattgtagggtggtatattagtctgttctcacgctgctaataaagacatacctgagactggacaatttataaaggaaagaggtttaatggactcacagttccacatggctggggaggccttataattatggcagaagacgaaaggcacatcatacatggcagcaggcaagacagagaatgagagccaagcgaaagcagaagccccttataaaaatcatcagatcttgcaagcctcattcactaccacgagaacagtatggggaaaactgcccccacaattcacttatctcccaccaggtccctccccaacatgtgggaattatgggagctacaattcaagatgagatttgggtggggacacagccaaaccatattaggtggtcacatggttgcctacatttgtccaaactcattgaactgttcacttaaaatggatgttttactgtctacaaaatatacttcaagaaagctgatataacatgtttttaattttttaattagattgggatattaggctactggtaccaatgcccaagggcttcccgtgggccccacggagggccagctcttgtcacacccaccgggtgaggcacagagaggccagtgttccctgaacccatagccaatggcaactgatagagcactttacatatatctttatgatggttagggtatttggatgattctgttaatttctgagttgtctacattttggggcgttggttgaaagcgacactcttaccatgttcgcacaacacaggagccagatttcgaagtggcacaggcagtctagggttgtaattacatgagctcaggttggttcctccgtcccttagccaccaacccccttccagtccctcttccacatacctctcttcattctgcgctgtattattattattattattattattattattattaaagatggagtctcactctgttgcccaggctggagtgcagtggcatgatctccgcttactgcaagctccgcctcccaggttcacaccattctcctgcctcagcctcccgagtagctgggactacaggcacccaccaccacacccggctaattttttgtatttttagtagagacggggtttcaccatgttagccaggatggtctcaatctcctgacctcctgatccacccaacttggcctcccaaagtgctgggattacaggcatgagccaccacacctggctgctgtattattatttactcacatacatatcttgccatgacgttgcagggatgcaacatgagtttactactccatgctccttccacatagccacccccactcctgcccaagcctgactccatacgcagtgtttgatcatagtccccattccataaactgtggtcatattaaaagtgaataaaataatccccagagtttagttgtgtatcattctatttcaatagttgtttttattgtggtggtaaaactaatataacctagttataacactctttatgatattaatatagcctctaatctgtcaaagtttctaattttgtgggcactcctttttattgtatttgcaaaaagcagtaaaatccgggaatgcagtgtactcttgttcccggaccaggctgagtgtcgggcagctatttcttgtggcccaataatgagatgcagatgaactggggaggaggagagtttttatttctgaaaccagttacagggagaaggcctggaaattatcactagaccaactcaaaattacaaagttttccagagcttgtataccttctaagctctatgtctacatgtaagtgtgcattcatctgaagacttaagtgattaacttattttaatctgtaactaatgtctgagtcctgaagaccttcctctgcagcctcagtaaatttacttatctaaatgagtccaggtgctggggtgattacccttatcttgacttctgctaaatcttggaggtctggggagttccttcagacttccaataaacttgtttgtggaagcctggggagttttttaaccccagtaaaacttgtttaatcctaaatgggtcctgttaagaattctttcattattttgtcatgcgttaaggcccaggaaaggcctgggcaaaacccttggtgggcttttgttacatttcagcctttgtataggggcactggcttttcttagcttttaatatttaacttaactactcggtcagtactgaagcagttgttatggaggcctgcgttagtgaaacctggccttccacactctgttttacatactcttacaaatccaagttctagaaaattgttttcaaataaatttatcttacgcagcagctgtgttctggattgcaagtggataaaatgaaactgagtggatttaaccatgcagcaccaataactaccaggtaggggcttcccacgtggaggtgtcaaacgaagttcgttccctgcactccctcatgcaatcctcaaggcaacatgtgagatttgcaatgaagaaattatacaacacgcagagatcacagagctagctaactgtgacgctgatgtaacctggaagttaccagtctttgaactggacgactgttacactgagccgtgaaagctgatggttctcaaaatgtggcccctggactagcagcacctgtccccactggaaacttgctgcaaatgcacatgctcaggcgtggatccgaaatttgggatggggcccagccatctgtgattggacaggttctccaggtgattctgatgcagctcaacctgagaatcatttctcttggggaagtggctttgtggaggaatgccactacagatccaatacaaagaatggccctgggaggttggcagtcaggtgttcaggtcaggtttcctcaaaggcaagactcctatatgacaggaagatgatcctgcgacttcataactacagatgtgtgtgtgtatatgtatctatgtgtgtgtgtctatgccatttgtatacacgtgttttttttttttcttcctacaatgtgatgaagaatcaaattgcaggctcttcatccacagaaattcccccttgtgatctgaggctctgccgagcagtggcccctccccaaagcagccccagttctccacttccctcctggcccccacccttgatcatggctcctgagcattttgggttttgtccaggggctcactaagagctctgagtaggaagttctcgctacaaagattcagctgtgggcgaaaaccgtatcatttccccaggtgacgtggggtgtgagggcagggctggagtgccccgggttcactggggagctgcagagactatcacttgccttccaggaacccttaccgtgtgccagcttccacaggactgtggtggaaatgtggtcaaggtcttaggagcaggccacacagggatggttcatgcactgagggaggggtgtggagcctctgattctgatgggactcccaggggtgctcacaatggcaaatgggctgctgttacctcctagcactggactctgggtcacccgcaagtgtaggtcacttccttgctggtcagtaatggggcacaagtcaccacagcaggcgccgctcctgaaactctcttcagggatagcacgggcggaagtgcaggcagcaggcagagcgtggaggtccgtgtggtgctcagtcactatggcaactagagatcacagagccacagtcaccatccccctagggcacctgcccagggaaaaggagaaatgtaaaaccacaagcatacaattaagaacaggtgcagagacccagcggcttccagggcagctttgaagggatccctcatctctctggtcccaggacatctgtgccaagggccaagcatgggcctgattataaggagcagcactgaggttccgattaaatgctcaaccctgcctgatctcttaccaggaaagggtgtgatatgtccccacccaaatctcatgttcaattgtaatcccaagtattggaggtggggcctggtgggaggtgactggatcatgggggtggatttccaccttgctcttctcgtgatagaattctcacgagatctggtttcaaagtgtgtggcacctcctccttctctctcttcctcctgccctgatcttgtaagaggtgcctgcttccctgtcgccttgcgccatgattgtaagtttcctgaggccttcccagccatgcttcctatacagcctgcagatccctgagtcaattaaacctcttttctttataaattacccagtctcaggtagttctttacagcagtacaagaacagactaatacaaggtgtccatggggaaagacacatggagagatttgggcagagaagaaagagaggctggaaatttggagctgccaattcccctgaacccctgttgtctacagaggcagctcccctttgctctcccttctctttctcccctcctctctcctcctttcacctcccatcccccatggaacccaacactcctctattaaaaagccttgcaatgactgcacctggggaagttgcctcctgagctgatgccacttccccaggacccacatcacacctctcattgcctccagtcccagaaaacagttgagaccatcagaggcagggtgaggagggcccaagacccccctgggaggagattgcctcaacatggagctgcaggtccactctagcaggtagcagctagagcctgggagcaagtgtggggtggagtctgacagtgcctgccccacatggaagagagcgagcctggattaggctgggtttcagggtttaatatgttggctcaacccctgagaaagtggttaataatcctccaggttggctaattggacaaagttaatgagattgaaaagcttgaaatcctggcacgctctagagaacagagctcaaagactcaaggaaatagaaatgtagaaaggtgcctactatttgcaactgactcagaccttccctaatatgcttcttccccaaggggcccggaggaagagaggaaatgcattggtgagtccttcaccagctctgtgggccgtcctctgtgggctggaggcagcgccactctaagcaccagagtaggggcggctcttaaccatcagagacaaggcaggtctcaatgccccaaggagcgagggatcgcaggtaacagtattttgacccataattgtctatggcaatgggtccttggtcacaggcaccccagacatgagacagagacctactaagtgctgcttgacatatttaggtggggaaagcccaggtctgctaggaagaatcctgcctcatggctaaatcccaggtaccagacttaaggcggtttgccacctttatcacagggttccaacatgagggcccttgaactctcctatggcgagaggccatctgtttcctgctgggatcctgactgagaggatggtgccttcacagacctcacatttcagtgagggggagggtcagcacaaaggtaattatgcaaattaacacagcaggaagttctccttatcaggagataaacagtacaaagtcatgcacagcatatcctgttaaaccaaaatacaaagtaaatagtgagaagtagggtttgatttagagtctatcttgatcaattaaaaattatgaacattggtccattttaccttgtattttgaaaaggtaaattaggcaaaattgcaactatgcccaaattcttaaaataatagtaagtcaacattaatggtggcagtagagttcttatacattttctgactatgttttatgatagcagaacgcaacatttttaacttcatgtttgacttaatacatcatgtgttcagcaaaagagtcatttttacaaaaatatgtatggcctttaattttcccaagagctcttcatcatcctttgaattaaattatttgttttgtcagggctggtttgtttctgtttgtttgttttttcttttatccccctaagtaaggaaacaaaggactagttgttgacagtctcataccctattgttacttagtctcatttttccagaacctcctttgtcagtagctttgtgtataatttgagtagtcccccacataatgttaatcaattccatgaaaccttacagcgtttccaagattgaaaatttccctttgccatccattggtgttatatttgtattgtgttgtggaaaatttgacaatcagaaaaactgattgccaagggcgtggacacaatggttagaggcagagagatgctcaggctaaacagggcaggtgttcagtgagggtgcagcctttaaatggtgcgtttgtggcaaatattttcaaggcagtctgaccacttttgcttctctaccaactttctaatacggggtccgaataacgaatgcttggagggcatccctggcctaccccagccccaggcacagtgcctggcacacccttagctttccagaaatagttattgactggatgaattgctaattatggtaaatggcattggtaaaaaaaaaaaaaaaaacttcagccaaattaaatttaaaggagtttaattgagcaatgaatgatttgcgatgcgaatcaggcagccttctgagccagggtaggcttagagactccagctacgtgatggaagcatatttatggacagaaaaaggagagtgaagtacggaaaacagaagtgaggtagggatgcagctgcattgtttacagctcggcatttgcctatttggatacagttcgaacagttggctgcatttgattggccaaaactcagtgattggcacaggtgtaggccaatctgcttacacctccacttgttagtgttcacgacttacagagaaccctttaggctgaacttaagtatgtacggaggctaaacctggtttaacagcataaagaaaaacaaaagagccaggaaagaggacaccagagaggccttaaagagtctagaggcagggaaggcctctgtgcggggtgaagtgggaggaagtggctgaggaaaagaggagcatggggcaggaagtacgggtcaggtcgggcgagggtaccacgtgtgagtgtgaggcaggagcgcagcaaggtggagatggggaaggcgcgatgacgtgggccctgcaatgacgcttgtctctgtaaaccacagagcagcagcggtggacagggacagaggcagtaaacacagggcatggtcccctccccaccccagggccagcagccctaaggaagagtgacttaggagagtagtggctgaccagctccagcagggcctggggtctgtaatcctgcttgagggcttccagaattccagtgctgcatgctactttaggtttagaaataaaagtattcagctgggtttggtggctcatggctgtaatcccagcgctttgggaggccaaggcgggaggatcgcttgagcccaggagtttaagaccaccctgggcaacatagcaagaccctgtctttacaaaaaataaaaaaaatgagactggcttggtggtattcacctatagtcccactactcaggagactaaggtagcaggatctcttgaattaagaggttgagggtatagtgggctgtgattgcaccactgcactccagcctggggaacagagtgagaccccatctcttaaaaaaaaaaaaaaaaaagaaaagaaaagaaagaaaagcattctcatagtgtgattcccttgtacctgtaataggtccattgcctgatgcactctgcaaatcaatatgctaagaccctgggctgcagcagagaaagaggcttaatcatggggctaccagaagaggaaatggcaggaaacctcaactgtatctccccaaggagtgtggggctagggtttttaagggttttggcgtaggctgcagtgtggagatggttgataggttggagagtggaatgaagccgtggacagggagatggaaaaatggtgttctcatgctgactcggttcctgttgtggggatcttcaaaccggttggcaacagctgttctgctggaattcaggatctgcttaagcaattcttaaacagaagccttacgattctaacagcagggaagttcctgtctagaggaacagtggggtgcagatggttggtatctcatgctatgggactttcccttacaaggaagtgggtcaaagtgtagcctgattaatgtttaattgtaacgatatttctgtccagaactattcttaaccctgaaccatggctccaccatgatttcagatagcagcagcagcagctcccttcaccctccgcctttctttctttctgcacccttttctaccttctgtcccttccctgcctccctctattaatggtgccctgaccacagttcctcccctttctccactatctacttgcccactcaaaaccaccaccataaccacaaaatgctgtgtgcagtcccaacaagagtgtcctctgaggctgcgatctcagggcaggagaacagagaagtcatccagggtcagggccagccctcataccagctgggggaagagcaggtggagttgaagggtttctccaaggtggaggtcccaaaaccccctctcaggaaggcattgatgcagggcggtgctagacatcccctagacaggctccggtgaaactgcctttgcagtatattatgacagtaagagaagtctgacatcattgactctatcttgcttctgactaccacgccatccttggtcattcctgggcacaggccaagctaactttggggagaatttatagtttaacttgaaagcaaggatgataacagtcccttcctaaaactaaccccatccatgctcaggaactgaaaaccaccttgtaagactaatgaaaggccacaagaataggattgtaggagggacctgaattctgctaaaatgtaggcatagtggccgggcgcggtggctcacgcctgtaatcccagcactttgggaggccgaggtgggtggatcatgaggtcaggagatcgagaccatcctggctaacaaggtgaaaccccgtctctactaaaaatacaaaaaagccgggcgcggtggcgggctcctgtagtcccagctactcgggaggctgaggcaggagaatggcgtgaatccgggaagcggagcttgcagtgagccgagattgcgccactccagtccgcagtccggcctaggcgacagagcgagactccgtctcaaaaaaaaaaaaaaaaaaaaaaaaaatgtaggcatagtttctataatcccttctttccaggggccatatggggatttgtgatttttcccaattgcttctataaataacatcactattgtaaaacctaagtgtttttttttttaattattattatttttccagactgaccctttggggatctgggactcatgactcaaccggtcttgtggccccacccagatgcagactcagtacatgtggaccattttctgcacccctgtgatttcatgcctaaccaataagcagcacccattccctagcctcctgcccaccaaactgtccataaaaaccctagtgtccaaggctttggggagaatgatttgagtagtaactccagttcttctgcgtgggccagcctcgtgtcagtgacacctcttctctactgcaatgccgtggcctcggtaaattgattttgtctgtgcagtggacaggaagagcccatcggacgattacactggccgggggcctgctctgaggatgctgacgccaaggagactcaagagagctggcaaaggccgggaacagcccaaggtggtaaagatacctgaaataagaatcacgcacatcttgagatcaagatgaatatcttaatatttcagcttatgataaagacatttggtgatcgaaacttttctctacccagagtcagtcacatgctgcagtcagtctccatatctggtcagctcctgccagagccaacccttctgcagacagcagctgtccacgctggagaaattacaaaaaataactgcctgatgccagcggagagtgaataagatgaaaccaattctggaagggcgttgacacttggaagaaaggagggcagcagggagcttctgtcatgaaggctgtggtggtggcggtcgtagccatgacaaatgaccaaaggaaaacagaaaaccgcaggctttctggtctgcagagccagcagactaagctcatggcagccgcagctgataaaaagcaagtgagcacccaggacagaaaaggccacaaggaggagcctcaaatcctgtgggtaaactctgcccaaattagatcatcagagcttcagcctttggtgacagaagccctcatctgcacgtcttcccagcaaaatggaaagcgagcattccccatacaaaaaccaagtgcactagacttccagccactgggctgagctcttcccccaactccgactctccaccgctcccagctgtcctaattgaaactcagagtggaataccaaggtctttttaaaacaaacaaacaatattcaaacttctcatcaaggacgcagttgagaaaacagcaacagtttgttgttgagccacaaattaagcaaaaccttgcttctgacaaaggacagaaaatgtagaggatttctacaatccaaagaacaaaacagcccaatacaaacttgaaacatatttgaacaggcatttcccaaaggaagatatacaaatattcaataagtacatgaatgaatgcccagtgtcattaatattagctaaaaaggacatgatgggggcaactggtacaatgtgaatatgcactatggattacaaaaattatatcaatgtgaaatttcttaatttgataattatactctatataatatcttgtttttacaaaatagatactgaaataggcctatcatactcaaaaggttgtgaagaaatggtgtatgtctaccgtgtatttataccttctctacatgctattctccctctgtctctctctctctctctcagcaagatgataaagcaaatggggcaaaacgcaaataattgctgagtctagttaaggagtatagaggagtttcattctctattcttgcaagttttctttaagtttaaaattatacaaaaataaattacaaaacatcaaaaacactaaaaagtactgaagttttcaaggaccaatggggtcttgtcaaccggacaaaacagtggcatgaagaagctaccactggccaaagttgtgtctgtctctgcatcataaagaaaagtgattggagtggattgaaatgcattgactcagtgacatccacaagcccatggtgactatgcaaaaaagatccagaacaaagggacttgtcacctttgaagcatctgctaaactaacacctcgcttataaaattggtcatacaagggaaagaatgaaaggttttattctgtttttctaggaggagctgcatttcatgggaaccaaataaatccatgatttacagcctaataaattcagaaggaacagtggagttggaaaaacaccatctcgcaaaccatacttgtagtgggctgaatcatgaccgcaaagatatcaggccctaatcgttatctggggttaactaacagtggatcaaccagataggctatgccttaggctgtaatgaaggaggaagtctgtaacaccacaaatgtgaattccagctaagaacattaccgtgaatccaccaaacctttagctccagcttctttggcagtaagaagtgcccagagcttaaagaacaagagagcccagacaagcccagaagatgagatattctgccaggcagcccgcccagtcccttcaaagccagcaacatgaaagggactgcactgaatgaaaagaatggggtgcagggatttccatgaagctgacagcctccagcttcagactctgcacaggcacaggccccttgcaaggtccagacagggtgtccacctggccctgtgtttcatctattttgcattagtgaaggattttaaccataatcgtgcctctgccactttcccctctaatttcaatcagacatgtgtcccctcaggtggaagggcattgaagtggccacaggcacttttagaatctgtttcaggggcactaattgaattgaatcaagggtggatgtggtggtttgggttccagagagtatttgtgtatgccactggtttgcagtaattttcatatgtagtacagtttctgccacctgtcctggagtagtatcacttccagaaatacttctaacactcattttgctacttacctagaattgagacacgtaagtgcagggtcaaacttcaaatcccagtatgaacctgtcctccagctccagcaccattgcgtgtgggagtgcagaagaaattaggttcaaagtgcactgagtcagaagctgggctatggagatcatttcaatcatcagaagtggaaaactgtaagagtgcgctgatgcctgcttctaaccagaatatctcctgtcaggggcgtaatgatatatcatatatatttttttctttttttgagactgggtctcaactctattgcccaggctggagtgcagtggtgcgatcacagctcactacagcctcaacctcctgggctcaagtgatcatcctgcctcagcctcctgagtagccagaataccaggctaatctttgtattttttgtagagatggggtcttgctatgttgcccagctggtcttgaactcctggtgctcaagtaatcctccactcagccttccaaagtgctaggattacagaagtaaaccaccatgaccagcccatcatatataatttttttttttttttgagattgagtctcgctctgtcacccaggctagagtgcagtggcacgatctcagctcactgcaacctccgcctcccagattcaagcgattctcctgcctcagcctcccgagtacctgggattataggcgcatgccgcaactcctggctaatttttgtacttttagtagagacagggtttcaccatgttggccaggctggtctggaactcctgacctcaagtgatccatccacctcggcctcccaaagtggtgggattacagaagtaagccacagtgccctgcccctgtcatatctaattttggataagaatccatgcaattggattcatcagcacacctgtttgtcatttgcaatcctgtagcagtttcgtgcacggtgttatgtttgtatgtgaagatgaatgttttatgcccctcaattatcagtaatgaacaaaccacactaaagaaagagtgtaattatcttgctaatatccctatagaaaatattacaaaatagttgtaaaaagaggcaatcaaagagtatgctggaaaaaaatgcaggaaaagacgtattacagagttgtattaagcagtgaattcataacaatattctgatagttttctagattttgtgctgcttatccacttttcatttgtaattttattataatttattttcctattctaaataaacatttgttttaatctaattttatattcataatgctgtatgtgctttcttttttagattttttttaaatgtatttctttaggctgggcacagtggctcacgcctataatcccagcactttgggaggccgaggcgggcagatcacctgaggtcaggagttcgagaccagcctgaccaacatggagaaaccctgcctctactaaaattataaaaattagccaggcgtggtggcaggcgcctgtaatcccagctactcgggaggctgaggcaggagaaacatttgaaactgggaggcggaggttgcagtgagccaagatcacgccactgcactccagcctgggcaacaagagtaaaactccatctcaaaaaaaaatgtatttctttagagatgggtatcactattttgcccaggctagactcaaactcctgggctcaaatggtcctccggctgcagcctctcacgtagctgggactacaggctcgcgccactatactcggcttgtgtgctttgtcttaaagaggccctgctccatgaaagggccgtgtatgcaaagtagaccccaaatgccaaaggagccaagaaaccaaaggagaaggcagacaaatccagtttgtggatattggttgatgtattggggaacttacacatggaagcgtggccctgggcggccacaggacaggtggctctctgcactgttactccccagacctggggcttatatactgcagggaaagggcgtacacgctccagcaagacaaaggcaactctccaggacagcaagaatgccatgtgcactgtggcctctaatttgtgcggcaacgtcaaggttgacaggttcttacactagagacagtagataaagcggacaccaggaggcattcaagggactggggccgatcagacgtgaacatggtgggttagcatccaagaaggagccacttttgtctccaggggccccctgtttagagacatagcccccagattatgtctctagaggacattttggggtgaactgatagtgtctggggtgaactgtttcggggtgaactgaagatgtctgggatgaactgaaaatgtccttgacatttgttaaactaactctaaaggacattttggggtgaactgaagacacttgccctctgagtaacccaggggaggggaggatacatgaagcagagccatgagagccatgcacgatggggagtcgggctcccctgggaggtcctcgcttatctgcccaggaacaagggggtggcctggcattggggagagaaaggagaggcagagtctgagacagtcctcaagaaataagaatgaggtgcaggtggcagcctccagtacactaagaaacggaagcgtgtgcaaaacaggccaaagcctggcctgtgggcagcccttctccccagccacctgcagggcccccacagtgggcctgggctccacatggagaagcgaaggagtgggagggaaccctgcggggcagcgggcggtctcctacccaagccggccgtgtacccatcacactgcattcgaggagcattgcacacagcaatcctcatgttctaagtgcttcctacctcccttgtgggaaatctgagagaggggtttgggtacagaactactctcccagctcagccagaagccaaacttccattcaccgtctcccgcagatttacagttttctctatccaaggagaagacaccactgaaaaaccatggcaaaaccacgtggtaaccttcagtttacagaacttgaagcagaggctatttcagaaagaaaggataataaagacgtttatttgcatttgtcaatcaacttaacatacagctgagaaagaaagactaaaaaccctctaataaagattgttaactgacagaagcattttgtttttgtttattttttgagacagggtctcgctctgccacccaggctggagagcagtggcgcgatctccactcactgcaactgccactttctggactcaagcaatcctcctgcctcagcctctcaagtagctggaactagatacacacagcactgcacccggctaacgacagaagcattcttatgatacgatctcctctcggctcacttcatcttagtcctggaggtctgactgtctagtttcttcttcttcagaattaatgtttcctgaaaagaaaagagaaacatgagtatatctcatatttactttgttctatttttaaagcctttattcactaacagatcttttgccgaaaaaaattattgtaactattaagcattcatcagtcaaaaattgaatgttaaattttatctcatatgcacttcaacagttttttcttttggtacccgacataaaataagcaaaatacgtactcaaagtaaatgctaagacaagactatccatgtaacatcagtaattctcttatgcctgcacacctgtccaaaacagccagctttgtggctaaaacatgtaattgcttggctattaatttaaaagaaaagcaggccgggcgcagtggctcatgcctgtaatcccagcactttgggaggccaaggcaggcggatcacttgaggtcaggagttcgagaccagcccggccaacatggtgaaaccccgtctcaactaaaaatacaaaaattagctgggcatggtggtacatgcctgtcaacccagttacttgggaggctgaggcaagagaatcgcttgaaccccgtggcagaggtttcagtgagccgaggtcacgccattgcacttcagcctgagcaacagagcaagattccatcttaaaaaaaaaaaaaaaaaaagcagaaatttgccacattcttataagacgctatatttaaatgttttgtgaaaggtagagctattttttattattaattaaactctataactttcactgttgggtatattaaagaagaaattagcagggtaaatctccaatgtaatgtgggattcatgatgaatacatgctgaacttgcattattttgataaatgttctgccgactaagcctattttgtattactcccttttcacttagggccctcctgacactgtggcctgggtgaccctttgctgggggctgttctgtgccctgcagggtattcagcaccgtccccggcctccacccaggaagatgccagcagcacctccctcaccagcctcccaagtctccagacattgccaaatgtcccctggagccccaaaaccactgagttaagggggtgttccctctgtccaaggctggtgcatgaacccacagtctcagacgcccgctggtactgggcatcgtccactcggccccatctctcccagtccggttttcaggattcctcctgctccatcccctccgttatctcccccaccaagtttctggggcctcctgccttgcctggctccagggcacccatcctcattgccccagagaagctcagagagcaagcctgatacaggcaatccccacagctcccagaggtcccgcctactgggctcaggatcaagttcaaaggccatctggttccaagggaaaggggccacctccccacccccacactcttctgctgtcagactctgctctctgcctggaatttccttcctggtttcacccattccttgccacctccctcccagctaacccggagtttcctggtcctgccccaggtgagtcatcacctctcctgggtacatggtaacacgtccctgtcactgcagggaactcactgattcctttattccagcttcccattaggtgctagagggcgagagcccagcccctcactcccacactgcctatcaaacccagtgtctccccctccagctgtgctccacagtgactaaggactgacatctgtgggcacagctagatgctgctgtaacactgtgcatactctagccactcagtcctaacagaatcctgtggactccctacctaccagggctcactctatccaccctccctgtgcaagtcagagaagcagagacgatgctcacttgtaaagccaggtttccacctgaccccacgtcccacctcagcactgcgtcactgggtgcattgctacagcgctcaggggaattaccgatcacgaaagtctatgccagcgctcaggggaattaccgatcacgaaagtctatgtgtgcttcaagcatctaagagaaaactgctttatgtgatttcattatttcaggtattattttcaaaggaatgggaagtatattcttaatttacaacagagacaaactaagtggaatgggactgcagaccccgtgcctgaggccgccgtgcccaggctgttcccagatggccctttccctcacaagcacgacaccctctttcagtcagatgtgaaaagtgcgttaagggaagcgagtcctctctccagactttctgcaagtgcccacaagcacttggggaaagatttttaaagattccaggagcctgaggcttcagtcagtcagaactgaggtcaaatccctgccctatgagctggcagaggcagaagtttctagattaatcttacatccaaacccattgaaaaagagctagttcccgacaccactagtctgaaaccatactcctgttagtcagccctgctaaaaatcatgcaaatcccagcactttgggaggccgaggcgggcctcctgtgtgaggtcaggagtttgagaccagtctgtccaacacggtgaaacccacctctactaaaaatacaaaaaaattagccgggcatggtggcatgcacctgtaatcccagctacttgggatgctgaggcaggggaattgcttgaaccagtgaggtggaggttgcagtgagccaagatcgcaccactgtactccagcctgggtgacatagcaagactccatctcaaaaaaaaaaaaaaaatcatgcaacagaagaaagccaggctctgcatgtctgacagggctctccagcctggggtcggtcctcctgtgacaacgcgcatgggcaccgctgcacacccaggcctctcccactgcagccaggcttgcaggagggcctgccagggagcaacgttctgagatggctccagtgagcgctcacagggggccccctaagccttcctcgagtccctggggcccagctgaaggcaggccttggtgaagggaaggggaatcccactgttcgtggcccctaagtgcgggccctcgccccacttccctgcgcagggacctcaccctcatccatgtcatagcggaactcctcctggtcatactcccggctctcttcccggaggacgtctgcatcttcatctccaggcctcatgtccatctcaccctcgaagccctccagcagagcctgggcctcctccccgggttctcctgcacctgagataaaacacaagtcagaagcctgagttcctgggaaaaatggagcctgcagacctgtgcagggcagctgtcccctgggctgccgtgcccccaccctccccctcccactggcagcacctcatgttccccatctcaacatccacccagcccagcctaggcctggccaggggagcagcccagtccccactgtagtcagtggcttggggatgggagcaggtagtctgataactttcattcctgagggtgttgatgagactcttgagaaagagaagtcccctggggttcctgagagtgccagccaggggagccagcagagaggagagctgggacagagggcagaggctgcccggccattctgggggctgtcccggagcttcccagtcacatgagccaagaaattcttagcagcatgagtattctttcacggaggccaatcggagttggctttcctccgcttgccatggaagggatctcacccggggtagccaccttcaactttccccagcacattaaggacttccagaaagaccactgggttggacatggaggtgccacacggacccttcttcagggaagggctgtcccctcagctgctgtcagtgccagcccggggtcacacccacattcactcactgacctaggtgaggggataagggtccccgagacgccacagtgctccccatggaatgaagcaaggttgtggaggccacacctccgcctctgtccaatcaactctgtttctttcctctcccctccgctctccgggagtgtcctccaatcccaaaggctctccctaataacatcccgcacactcaactgacccagcatctgattttcagagagtccaaccacacctggcctgaaaacaggatgtccacaactcccacagcccaaaggcgcccacaccctccatcccacagcctggggatgccccacaccctctgtcccacagcccgggggatgccccacaccctctgtcccacagcccgggggtgccccacaccctctgccccctccaccccacagcccggggatgccccacaccctctgccccctccactccacagcccggggatgccccacaccctctgccccctccaccccacagcccggggatgccccacaccctctgacccctccaccccacagcccggggatgccccacaccctctgtcccacagcccgggggtgccccacaccctctgccccctccaccccacagcccgggggtgccccacactctcagctcctggagcgtcttggccaggtccatccgtagaggtcggctttttggggagagttggtgtccacagggccaattcagtgatttgggtagctttccattttggaacaacagttactaattcttcctcctcttcctcttctcctctttcctattttaagtgcaaaaatgtacatttaccaacatttgtgtcatcttggtctggaatattaaaagtgagggaggaaggacaagttttgaaagacaggttttggcttgtgtttcagcctttttaggacgtcactcaggaatcagaccagttgctgactatccatggtataatctcagggttgagaatggatcttgaaagagccagggtgaggaataaagtctccagagcaatgctgggccagcgagctttataatgggtgccacaaaaggctttcagatgagcatgtcgcagtcgcctgcaatagctaagacatggccaggactaagtggccagaactgagtgaccaggagtaagtggtcttttcaattgttcggccacattttgcaactctaatataaaaaatcgtgtattatataattatatgtctattgagcttagtagaaacataattatttatattattctttatataaataataaaagaaacagccatttgttttaggcttaggcctaagaagttcctaagatgtccatatgatatggatttgcataaacgcaaaagctcaagtgtcaaggattatggggaaaaataaaattcaaggaaagcagaatgagagttcatcaagtctgaacatggaacactttgtaataaaaaatgtacaattccgacaatggtgagcagccaacatgtgccaattttgccaagcatatttgcctacttctcagttttgtgactatcacaaaattccaaagatctgagcatcagcactatgactatggaacacttcgctgccacataggtgataataccgatgacagagaggggcagacacctgcctcttccactgagtcactgggaaatcaattactctctattttggtctcagagtgtttgaatatggccacccatgaagggtgacaccaatgctgcaggacagggtcctcaaacttgacttagatcagaatcacccagaaagcattaaaagacagattgctagccccacccccagagtttcagattcggcaggtctgggatagcgtccaataagctgcattcctaacagattcccaggtgaagctgacagcactagtttgggaactgcacgccactttatgtataaaaccaagaggtggaaccctttcacattgctggtgggaacgtaaaatgctgcagctactgtagaaaacatttgacagttcttcaaaaagcgaaacagcatcaccatatgacccagcaattccactcctcggtatataaccaaaggaactgaaaacagagattcgaccagatgcttgcacaccaatgttcactgcagcattattcataatagctaaaatgtggaagcaactcaattgtccatcaacagacaaatggataagcaagaaccttgaaaacgtcgtgctaaatgaaagaagccagacacaaaaggacaaatacagaatgaattcatctatatgcgacatctagaataggcaaattcatagagaaagaaagtagattaaaagctatcaggggctgggggaggtcgaatggggagttgttgcttaataggtacagagtttctgtctgggataacggacaagctccagaaatgcatcattctcacagctgcacaacactgaacgtactgaatgccactgaaagcatgctttaaaatggcaaatttcaaactctataaacgtacatataaaaccataatttaaaaagaaacagggagtgagccgtgggctgcagcttggcaagccctactctagaagggatacattccccttactagggagagagaacacggaggcccttctgttccaccaccatcctaatccatccccacagcacagtgggaggccttccacaaagccctcaggttgttgctgcattatttcatgggtggtttttcctaaacagcaacaggacttggggcttatatcagtaattctctcttagatgttactgatgctccttctaccttcttctcatcatcctgaaatactgacttctaggaactttttccagtagagtctaaagctgcaaagcacttaataagatgggctttatttttatcactacacaaatgtaaaaacttgctcaatcaccagtaaccctaaacagttattaccagtgctgacaagatatcaatttaaccaataggttccttcagggaacagatgagaggtgtccaaccccatggaaatcccagcaaaatactaaatacctccctgtcacaatcaaatcctaaagccgactgtctttcttaggcttctgactatgtgtgtaggaggttacacacacacacacacacacacacacacacacacataaatgaagtggaacctcgggggaggacagtatgtcaaattcctctacgttttgttagatgcaggtgacttacaggaagctgccttccacccagactagagcaccctgcggtccatgaagaattcgtgctcagaggaggtagggcctcttacttagcaacaaaatcaagcattttggccatttcattttctggttttctagggacctgcccctagccagtggttccttttagctggagcaaagcaggagaagaggcaaggaagacagatcactgtgaggccacacaggattctggtcagccaagaaggtggaccatgagcaaccatgggctgtttggggaaactaaataaccatggccagagtgatgtgcagaaagtagaatatcacaggagcgggaatcaggaaaagagggtggctgaggtcagggccgagagccccggggatgtccagactgtggccacttgggaagcagcaacggagcacggacagtcacttgatcatgggaggttaagggataaagattcaaagactccctttggttttagaatctaacaaactctaggaagaaaaatgagaaaagttaaaaaactgtctggagggctgggcgcagtggcttacgcctatagtcccaccactttgggaggctgaggcagtggatcatctgaggtcgaaagtttgagaccagcctgaccaatatggagaaaccccgtctctactaaaaatacaaaattagctgggcgtggtggcacatgcctgtaatcccagctactcgggaggctgagacaggagaatcgcttgaacccgggaggtggagtttgcgttgagccgagatcacgccattgcactccagcctgggcaacaagagcgaaactccatctcaaaaaaaaaaaaaaaaaaaaaaaaaacctgtctggagagcattgaagagcattgaattgaaaaattagtgatgagtttagacttaggattcaaggccagggcccttggggtgaaaggatggagcattaggtagagacagcagtgggcggcacagagcaggtgcgggacaggccctcatgcacaggatctcccgcagccttccaagctccccacagtgtggcttctacctcctgtgaccaaggatagctttccacagcctcacacctgagcccaaggtgacgaggagtcggtttaaagcagggcctctgggtgatgccaagggcttgacgagggacacagcaacaaaaaaacaaaacgaggtgacttggctcaggttgtgacatagtttgggtgtttgtccccttcaaatcgcatgttgaaatgtgacccccggggttggaggtggggcctggtgggaggtgtttgggtcacgggggcagatccctcatgaatggtttggtgccttccctgtggtgatgagtgagttcttgctctattagttcacacaagaactggttgttaaaaatatatatatatatacctggcacctcctcccctcttttcctcctcttttgagctatggtaccagctccccttcaccttccatcatgagtggaagcttcctgagacctcaccagaggccaggcagttgcgggtgccatgcttcttgtacagcctgcagaactgtgaaccaaataaacctctcttctttataatctacccagcttcaggaattcctttatagcagcacaaaaaggactaacccaggttgaaagggcattgatgtgatggtagacccaaacaagccgttccccggctttcttcagaaagaaagtatgcagacatgggagagtttgtgtacgataatatattcttaactcactaggaggggacacctcaacaacttcagagaccaaaaaacaaacaaaagcgtgattccacactcctccttaaaactcaaaacttcttacagtgagaatgacctcatctaaacaaataagtcaaaaggatcaaaaccagtaccagggtcaggaaatgttgctgaattgctaattatctagagggattgatcagacattaataatgagaggaataggaacacatatattcccacctcaacacacatacgcatctcgatgccttataacggcaatattagctgactagctttactattaaccagggaatgtcaatgtagtgttaatattaatgttagatattggaaaggaaaaaacaagagaaagacttaccaacggcacgttcagaggagcatgctgcacaacggacaagctaacagtcactggacaaactgtggcaacaccagttacagattcagttttcacttgcaggacctaacactgtctagaaccctcccactcaggattagttttttatttattggttgtttgtttgtttgtttttgagacagagtctcactctgtcgcccaggctggagtgcagtggcgtgatcttggctcactgcaaactccgccgcccaggtttaagcgattctcctgcctcagcctcctgagtagctgggattacaggcatgcgccaccatgcccagctaatttttgtatttttagcggagacagggattcatcacgttggccagtctggtctcaaactcctgacctaaagcaatccaccgcttcggcctcccaaagtgctgggattacaggcgtgagccattgtgccctgccaggattagtttctatcaacaaaaacggtatctatcaacaaagtctagagttctgcaataaatgggaaatgatattgtttgcttctggcaatttagttctgtactaacacatgcagataaggaaaatgaaaatgtgaaagtgcctaagagttggcataacttttaggcgaatcacctccaaccttgcaggatcaatatttttgagcagctacttccctgttaatgtaacaaaaccctacatgctccgcaacttaccatatctgttaaacgatattcaccatgttgttcacacccaacatcaaatacatactttccagggccaacaggctacgagcaaagagaaaccattcttaagtgtcaacacccagcagaaaatacaaaatacaaatgtcaccaccacaatacccacctcaaatcaccaaattgggtaaagtgtaacatggattaaggaatgcttttgtgaactcgtggctgatgggattggaacttatatgccctgttttgtttacttttggaaactttaaccacattttacttttttataaaagtgatgtattcattttcagaaaacctcagtgaatcagtatccataggcaaactagctaccgatggaactactactaatattttgatgcattctttgtaactttgcttctagtatacatggttaaataaaaatctgatcataattatacatactaactcatactctatttttactgagaaatatggcatgaactacttcccgtatttacaaatattctttcctaataacagttgccacctggtactttatttcatctatggattgcaacctattttactcagttactattgttggtatttgggatactgattttttttttttttttacaaagaacgctccagcaaacgtactctgagttaaaactttatgtacgcttttgataccatccttaaattctcagaatttctggacaaaagcatacatgtgctttgattagatgaggctctaatcgtttcattcccataactgcacttaagagtcccagatcctcaaactcttgattttaggagtgtaaaaatggtctatttttacatgtttttttatataaaacaacagggtctcacaattttaattcacttcatttcagttgttagtaagcctgcatttttttcaagatttttagccatttaaatcacattgattgataaaacactttatatattaaatgttgcaaatattctctccccatttaacagtcatctcttagattttctttacagcattttctaatctataagaagttatttttataaagctaaacctattggtttttcctttctatttctgtttagaaagttctctttcctcatttcaaggttaatattcatctacattttttttctatatttcctagggtacatttaaatctttacttcttctagaaagtatcttcatctgtgtgaaggcaaaactattattttcctcccaaataattgtcaagtgttcctagcactatgtcttgactcctcccatcatccctttgttaatttgacacgcttattgtgtgtgaaattattttatatactgggaactgtctctggacttcctaatttgcttcattggtgtgtgtgtgtgtgtgtatcctggtatcacactgttttaattattgaagttttgtggtattgataacttgtccacaaggacatgtacagggaattttctgaggaagaaacacaaaccagcaataaacatgtgacaagatgtttgacctcactagtaatcagggaagtacacattaaaacaatgagatgacattttttacccataagattggaaaagaacaaaaacaacattaaagactgagaatatccaacatcgatgagaatatatgataaacagactcatattctattggcaagagtataaactgacaccactttttaggaaaatgggcactaccgattgtgattctaaatgccaatcctcaaaggtttcacaattccattatctaacctacacaatagtcccaaatgtgcaaaatgacaaatatgtatctttatgtatatttttgtatcctgacacagtatgatcctaattatgtaattaaaacccccaaacaataattctgtgtcagatgactgtattagaatgtgcttacatgacacacagaaatagtgtggaaggattgggcccagggtggtggggcaggatcctagtgtttaaatgctttacaattggaatgtacttgtgtattatttgtataatttaaagttttttactaactagcaaaacaaagcctccatttttaccccgatttttcagactggtttaggctggacaagctgattgattcttccagattcattttcatcaaattctcttcctctgcaaccaccttcccatctcctccaaaaagacccacagaaagtttgctgggaattatataaacaatgtatgggtttgaggggaatgtgctgttttgatgaagactaaaagtaaaatctgtggttagggcatgaattatacgtaaatgaaaactgggttctaagagagtctgaagagacttcgttgtatcagctaaacattccctctgtcaacttctaacaccatcaatttgctccgcaaattctctcttcagggaaagtttctgctcaacccctgatcaaagctaccacgatggcctgagtattagcttctgaattattcaaggtttctctgtacaataagggcaagaggaaccaccgagtcttccaaacagaaacggcccaccatgggtgctagaagctggcaagcctccagacgcagggccaggcccttggcagccttaattcccaccacaactaggagcacgcaggctggcctgtagcatgaggagggagctgggggtcttcctccccagggatgtcgcacctccccttccagggaaacaaaacccaaacacctctatgctcaattgcaggaaatagatatttggtatctgatttacccatgagaaggaatacacacaagaggttcagatgccctctcgtgttatataacaatgcaacaggtccccgctgaaagacagtgggaatttgtactgagatccagagaaacgggccaatccctcccttcccccaattctgtgctctgtgggtaccagaggctcagagaatggcacagctgtcctgttctccacatttgaataggccggactcagttttctctgagtttttggtattctctggtcacacatttgcacaggctgccagagggggttattttgtacttcattggcaaatgtcacttcccatggacttacatttttgttcaagaacttgccctggtacctgtggttcaggtgaatgagctcggccgtgccctcctgctgtccgttcacccaggtgccaacatacttactgcccgtctccgcgtataaataggtgccttgcccatgcctggttaagacaaggggaacatggtatttcgttccagcacagtgaaaaatctcccaggtttaaaacacagacattgacattgagggaggcccaggctgttgcaggctcacaagcgatgtagcttctatatctgtgtccagtcagaaggtgccccttgctcagtgtgccccaagcacaggacattgccagaggcacagaggacaggccagctggacagaggcaagcctcctgtgtgtcagctgctttccccagggaagaggcagagctagtgggagctgtggctcaggtcccccagtggctcttctgtgccctccactccctgggactcttgggtgaaagactcacgtgctctgccccaactgaggtgcagatgtcagatacttgagtctacacttgcacagaaaggcatccttgcctcaaagccatagaaagattggacctgcctggcagagttggtaactgggcttttgttatgattctgttcctcagtaagtgtaaacaatctgcagacatcatgttctcattacataagcaaatcccgttaagacccaagatagaaaccgaacctttgatgagcaaaccactctccagtgtaggtgtcattattgatgtagtagtatacgccatggccgtgccgcaggtcatttgcccactctcctgaaaggaacaacacaaaggcaagcccaggtgagaagaagggatcgatgccctgtaccatgtcttcaaattgttaaccatggcaaaggcagatgtgttgtgaagcaaatgaagcccatgcacacacaggccccttctgctcaggaaatcctgcagaagagagatttttaacagcaccgaccaaggctgctatctgtttccactctgacatccctccaccccttccttttgtgccagatggcataggtgctgagccacggtggacagtgggctaagagagggctgagtcaggagttcacggggtacagagtgaggtgtatggatgtgggccacagccacctgcatgtactgacaagcacatttcacaggttagtcagaggcaccacgaagatgcaacgaggagggagacaaaccaaggttgtctgacccattgccagtgatcctaacaccacacttcatttaccttgcaaatgtttagagatccagcaacaactccagggcttgaccatctatcctcagccacctggcagcatttcagtctatctcccacccaatcatctgactccaacatgccactctaaccccagctgcacaccagctccatccgctggtgccatgcctctgtttgaactcttccctcacctcctcacctccatacggcttctgctaagtccttataggcttggtaggcagtactgaaattggcaaggatatcataaaattcataataccactccatgatgtggacaactgcaaactacttttgtcaaccacagtatgaatccctgcactagaaaactcaaaacgtcctcaaatcttacagctcacttaggaaagaaacttaatagaggtctcccaaaggtgactgctcttaaaaacgtgcatattacaccaagtcattaagctaaatgatatgttttgagactatgaataataaaaagcaaatgttgatcaatttgttgatcaaagagaaaagaaggaattatatttctattctctctatagaaaacattacaaaatggttgccatatggagaagcattcaaagagtattagctaacaaaggtagagaaaagctattctagaagtatgtcagacattaaaactcaggctacttagattctgtgatgtttgtggtatttttaaatttttaacttattttgatttatcattgcaaatgaaaattcacttttataccaactttatattttcttttttttaaagaggttctcaaaacttacataagcttctggcttacacaaaaactggacccacttccacatgaagataaagaatacccaataggctaagaaaatgctaattattcaagtaatatttgtttatgtgaataaccccaaaatttatctgcagaaggaacttctacatatttatttcctcaatcatcccattatttactcagcacctacaatgtcctgggcactttgtgagatgaacgaagagctgtacaaaggacagtgcatgtccccagggcgcgagcaccagcctgaggatggaaggttggcacctgagcagcagctgaggacagggaaggcagcacgaaaagctgcatggcacaatttcaaaaagtgggtaagtcattcagaaaagagcaggcttaccaaaaattcatggagagagggaaggtggcaactgctaacaattaaggaagaggactaggtcccatgatgtgatgtgtgacaggaacaatgtgaacaagagagatgaagatccccaaattgagataattcagtaaaaaatacttcaggtccctgaacctaaattaaccatgaggatgtgcaaatacctagagggatttgtctgggtcttaaggggcagtgatgtgcctggatttgtaacatttgccaggttctgtggtgtaaatactcacaccgcggccaatttcaagctacacatggagctgggaagagatgcacagaatgggtttttgtgagctactatgagggggttccagcacagccctggggcatagagacctcagctgaaacaggtacatcatttggtttcttcccaacaaaacttcatgacaaaattattacatccctcctctcttggccatgtcagaggatctccagggtgtcatggtgagaaaaatatattacatattttgcagaaaaatttcaaaaataaaagagaacagttaagttgcaaaagacactaaattttgcaccaagaggacggtgagcaaaattttttaaagtcccaatctacttaaaaaacctgttaagaggctcggcccagcattttgtaatgccaccacagggaccctgcacaaatagagaaggtaattcagagaaaagtcacctgctgaggcacatctctaacagctataagtcaagtttccttttttgaggtgagtgacatttgtaaactttattattgtggctttaaatttgcacttaattttttttttaaagtctttctaccccaatcctatactttctgatcattcttgaacttgtcaactgaggttttttccaactatatttcttctcaggagtaactcccagttggttggttggttggttggttggttgatttgttggttaactggttggttggttggttggctggttggctggttggttagttggctaaccgattggttggttggttggttggctggctggttggttggttaactggttggctgggtggttggctagtcagttggctggttggttgattggttggctgtttggttggctggttcgttggttgtttggttggttggctagtcagttgactggtttgttgattggttagctgtttggttggctggttggctggttggttggttggttggttggttggctggttggctaattggttggttggttagacagttggttggttaattggttggttgattggttgcttggttggctagtcagttggctggttggttgattggttggctgtttgattggctggttgtgggtcagttggctggtgtggagcaggtgctccttgggtagagcagtttgtctggcacttgggattgaagacaatttaaaatgagaagctctccaagatgctcctcccccctcaaatgctggttggtcactggtttgccatgctggcccatggtcttgccaagttggctccctaaactgctgggtcagccaaacacaggagagaaggagcccacacttatggggaaacactcggtgtcagaccctgggcagggttccgtgcacttgccacagcatttggtatgtgtaatcgctgaaatatggttttacagatgcagaacctgaaaagcagagagactgcatgcattccccaaggtcccacagctggtgggtagcaagactgaaatgaaaattggagtctgtctaacaccatgctctcttctccacaagcatcccaacagtcaagtgctcattttttccagctcctgccattcgggggcttccaaaaaacccaggttcaagttatcatgtcattcttctttctccacaatgtcattcttaaacttctttgttttgatgagttctgtttgacaggcaacaaggccagcagggaatagggatgctctttctcccccttaacctcagagtcctcagttggccctacacccccaaccctcagcatcagtacatggggtctaggcctcccccacatctggcacccaccctcccctccatctcatcccccactacccctaaaaacctcggccttcctgcctgtatccaagtcacccgccacccaggaccgtctccccactcctctcctgcagcactatagcctctgctggctcctggactccctaattggacttgtgtgaccatctgggagacaggtagggtactggactttatgccacagggtcctgacgttgaacacactgccctgcacaaaaccattctggcccattgtgatggcagccagccaagatacactgttatgaataactcagccatacattaactgagattttgtgattggaagagtattggcttactatgttataattaatattataacttctgacctcagtttccattgctgccttcatgaagtaagacacttatttaagcttttgtcagagaagaaatctctgggtagtggctaaatcttgcaccctttaagatacaaagccatctggagaatcaaaaatcccaactgttaccagaagagctttatatgttagtgtggcataataagaaatattggtctttattcatggttcccagcacagagctcctaaaacccttgacatttcctgactgatagaaatgtttttgttattcaaaatgagactcttttgaccacacctgaacttatgcaaatgaggcccaggatggcctcaagatgggactgaacaccagaaagaccaagtgataagaaggatagaacctccagccccacccaccaacttttggtaaagaagaaggaaggggccagagattaagctctgtaaaaactcttgagcaagatttgttgagcttctggggtgataaacatatcatgtgccaggagggtggtgcactccacctccacaaggacagaagctcctgtgcttgggaaccttccaggccttgccctctgtacctctgaatctggctgttcatccatattctttataatatcctttacagtaaacatgagtaaagtgctttcctgagtcctatgagccgctatggcacattatcaaacctgagtagggtgttgtaggaacccccaatttgtagccgagtcaggtagaactgtgggtaccctccggatccacaacttgaggttgacatctgaagtggggcagtcttggaaactgagcccttaacctgtggggtctgtgctaactctgggtggtgtcagaatggagttgcatcattggaaactcagttggtgttcacagaagactggagaagtacatagcatggaaaatccatgcatttggtgtcagagaaacagttacccatttttaaccttcatattcaaaattccttaaatcccttatcctaaatatcttcgtgtgtgtgtgtgttgttcaaattgtatcaacatctacactaaaatcaaaagtgacaagaatgagattaggtgcataaggatttggaaagaattaaattaagccccaaattaaattgtttaaagttgatttaaaaagcagatggtgcttcttatagagcaagccttctgggatttatgaaacaaaacaaaacaatttctatctaacagggatggtattaaaaccctccatcttggtctcagaattggacagaatcatcactgacatctattaaaataagaaccacctactggttcttattttatctaggagcaaagcaagcaactatagctcgcactttgtaagaatatgtcctcctcactaagaagtgatgctgtcacaagtggtacatcacagtcctagccccagttactgagtgctcactatggatcaggcaaggttgcaggtgtctccctgtgtttatccattgaatcttcatgctacagatgagaaactgaggcaaggagatgtgaagtcacctatgcaagctcacacctattgtcaccagagtccaaggttagggtcacagatctttttggaaatctgaagaaaactagacaatttctttcttcctagggaaaaaacaaaaagcccagaacacagaattttatatacactttctgaagactcacaacacgctccctgccggtccccctgcccaggtttgggatatcactaatgtggtcacaccaggtgacaacggcacaaggggcggcagggaggttcttggaaataaaggaaaaagaatcctcctcaaacataacattggcctgtaaggacttatggcacaggtaggaaaagtcagtttaacaaggcaggaagactcccagacaggaagccctgatgtaaggaaacactcgatctgaagaaataacacatccgtcagatggcggggttggtcagaaatggaaaatgcaaagacaggttcaggaagatgaatgccgcagagcagctgaagccgtgggtccaccagctgcgaggcctgcgtccactcaggagcctcccttttgtctgctcccaggacatggacatgctggccacagggacagatttcccactacagattcattagtgagttaattaattacaaggctttcctatttctgcatcaacactgtgaatatagtaacacgatctgtgttcgttgaatgagtaactggagaactttaagctttctcatacatgtcagtattcacagacaagttcagtcataaagaaagaaaaacttctgtaacacgaaaatctgcttagtgataacattttaccttcatatctggatccatctggatatataaaagtgccttgaccgtgctttttatttctaacatattctccgatatatcgagcaccatttttaaatttgtagatcccctgaaacacattgattatatcattcatatcattgctgaatgtagcatttgctaacagagtattaaatagagaaaaccatccagtcaagtcaacggttctgacctggccatgtcttttaccgaattcgtagctcccttcgtaggtgtccccgttgggtagccgtgccctcccacgtccgtgcctttcgcctgcctcattccgacccccctcatattcctgggtaatgaaaattgacacaattacagctaccattcattaagcgctaaccaggtgctaagcattttgtaaatatcatacccttgagtcatcccactatgctaaacccccggcactatactcaattgtcccacctttcccaccttaaagttgaggtaggtaacaacgcctgggctagatgaggcactagaccaaggccacaccccagcacatgtccagggcggaagcctcgttccctccctccaacacagagcttgcaattcattgtgataatcctttaccctgtaagcaaggttaaccaatttgtgaaaaatgctagatactctaagctgtgttcttagtaggaacatgcttgaaatagtacatgcgggtagaacagttcaagtccacacaaatacctccccgtttgcttccttcagtaatccaggatttcaaaggcaaatgcccagagagaagcaactcttccctcaaatgatccctggggcggggtgtggcctgaagagacctttgccctgcaaggaatttccgatggaagggacaggttggagggcactgaggagtacacagggctcccttgctgattaagtttatcttatttttaagacccctagcaagagacttaaggttcgaacactcatgacccaatgctgcaataattatgtatctatctgtggtttgtttttgtttttgagacagggcctcactctgttgccaaggctagagtgcagtggcacaatctcagctcactgcaacctccgcctcccaggctccagtgatccttccacctcagactcctgagtagctgagactataggcatgcgccaccattcccagctaatttcaaaatttttttgtagagacaaggtctcactatattgccctggctggtctcaaagtcctggactcaagcgatccttggcctcccaaagtgctggaattacaggtatgagccaccatgcctgctcaattatgtgtctatcttaaaagtaaataaataaaaaatgtgatcaaagcttgcaattttcctatccttcagaaaataaatgttccttagcacctaatacatgggtatagagtgaatatagtaaataataaaatgctgaaagcatccagtaatgatttaacatgggtatctcataacatcacactgtatttcttaaatatacataataaaatttattaaaaattaaaattaagaaattgaattggatgtatatagacttattataacacaagtactgacacactacattgaggacttcagaaataaacgtctgtgcaattcttgcccttttctagcactgtttggaccactaattcctgcctagaatataaggtaaaaatctgcgacctcacagatttgtttcagggttagtttacatcaaaatgtacaaaagtcccctccttctatccaagaggcttcccaatacacccaacactgagccgctggggtggctgaataagacagaaatcctttaaaatgaccccaaatgtgatctgaacctaaaaattataggcactaaaaagttacaaatcagtggggccatttgaggagacaaactagaaatcttgctggtcaagtgttgcaggttgggttcacctagaaacagaccctgaacaagtgatttttttttttttttgagacagagtcgctctgttgcccaggctggagtgcagtggcgtgatctcggctcactgcaacctctgcctcccgggttcaagccattctcctgcctcagcctcccgagtagctgggattacaggtgcccgccaccatgcccggctaattttttgtattttagtagagacagggtttcaccgtgttgcccaggctggtctcaaactcctgagctcaggcaatctgcccacctcggcctcccaaagtgctgggattacaggtgtgagccaccgcgcctggcctgatttttttaagtgctctcctgggagaaagtagtaaagagggcagggaagtagacatgaaagggcaggcagctaaggaaggatgcctttgcaggtgaagtcccagacttggcctaatccaacagggactctgggggcatcaatcgcactgcagactttgtcctgcttcttgcactagctactggctgtctggccggatgtgaatttcaggcacttctggctctccatactgggcaggtagttccagcgcacagaggtgatagcttgagtagcaaatcaggcggaagctgggagatgagtgcccagagctagcaaaaaggtctgggcaggcactgacagcaccactgcagagtcgctagatttttcagttaattctgaaagtacctcaactctgtactgtgcatgcagaccatagtggctgaggttccctatctgtcagccatggagaggtcactctctggagtagggaggaactactctctgggtgatagaaatattcccacacagaacccagctcacaggctggatgtgccctctttctcctctctgctgcctaactcaggaaataactccaaagacctgggtcagttcagatggggactgaagaaagcacatgtgaggatacgcctataaggtaatatcttcaggaaccctctcctgagcccagggcctcctcagcatttcttggaggctgccaggaagcaactatcctccatgcatctaaatgccgggggagcaaatctcagctacagaaatgacttattcaagggcagtatggcagcgtgggatgatctgctcatccgagaaaactgcctcgatgggaattaacacagggaggaggaaacttccaaagccttccgctgggaaatctttgcctttaatgggaggcaggatgggggtgggggaagaacgaggcggcatgtggtaaccagacgtcacagcgtttcacttttcaccatcaacttccaggacgcacgcaggtgtgtctggcgtggccttcgtccctgccggggatcctggggagctgtggctcagacctctggtttctgcgcctcctcactctccaaacccaacctcgaggttcccccgccgctgcgcaccctgggaagccctttctcaccaggagctctcaccccaatatcattctctccctcctcctccaactcctccgagcccaggtccgacatggtctcgccccagcctggatcacagccgcagcgcctctagcaggtgggtagcaaccgcctccaccgccgcgtcccgcgtcgccatggagacgcggccggtcccgcctccctcccagcccggaagatggggagcggggacaggcgacgcggacgaagcgggaggagccactggcagcctttgcgtactgtcatagcaacgggaagggcacctcgaccaatcaccgcccgggaatacggaggggcggggcggaagggacgaggtggagccagtggcagcactctggtgccgtcatagcaacgaggggccgcttcggccaatcactgctcgggaagcgagggggcggggactgggcagggcctgagcgggttctgtgcctggctgcccaccggctctctgacctggacctcgccgtcgctggcccctgaaatccatcacttttgtcggctgttctgtgacgccacaacgaggagccacctgggtactgggccctcaagaggaaggacgcgggaaacgcgtccgggccaactctcgagagggtttcacccctgcccagtgcgggcactgcccgctcccttccgcccccaggcctcgcaggcccctccggggatgctgcccacccccacttacctttctaggctctgctgacccttcgggattcgcggctagctgtgatgtgtccgccaagatctcttctcttgtctgtaaacaacttcactctcaaggaggcagctctggcctctcagcaggtgcggcctacagtgatgtccgtccgggttttacatccttccccgacctcgacatgagtcccagccccctcgggcctctgactctcaggtgtcccctacgatcgccgtcctctcctctcgctcctggctcccctacactgtcacacacccacacaatcacagacgcacacgcatgtacacgtgcaggcttggaaatctgctttacctgacgcactccgcctgccgaaggcccctcacatctcccatttcctctgccatcatcccagactgcaaagctgtgttatttgttgttgctgcaggagctggggaggagtgactgaataactataggatttggtcttgatgggagaatcccagaagccaaatccacgcggtgaataagctgctgatcttccagagcacacatcccctagagattcttcccaatgctaatatgaaaggttacaaccataacccatcatcaggcccaaatatattacttactgaataaatacacaagttacaacaacacacgagattccaaaattatgtcgttttttagatgcaaagataaaaatgttgtaaacaccaaaatttaacagcttttcttatggggaaaagtggggagttagggataacagatgattattattttcttctctacatattggcagttacccagttactacaattaagcatgtcctatttttataataaaatgccagaagcattttaaatgttagaaatctagaatggtaacataagtatatgcaaataaatactcgttttttacatttaaaatgtcagaaatttagctttcaaatttgtcctaacaatgacagtaaccagtgtttactaagttctgacactgtgtgtgggcactgttttaagaattttatgagttatcttattaaatcctcactatcattcctccattgaacatctaaggaaagggagttatagggggttataaactaaaaataacctcctaagccccaccacagccaactgaatggacccctcttggccaagagggccccagaaaccttaaaaactgcgttctcagccatgatgggaagggaggtcgaacatgcctcactaatacccttgtgcagtttagacacaacaactaacaagcattaatgttaaaatagagatcataagactgacagaatggacgctgtggcagtaagataccaacttacaaacaggacctaaggccatgccaggcatgagttaagtcatgcatccctacacttaaaagaataaactatattttaactacctggagaaggtcttatgactcgtgttttacatcctgtacttgagcaaacaatcttactgtgaatctctcaaatcgtatcatgagttcctcagactgttgatgtactaattaatacgtaaactactgacactgaaaaggatactgatttgtttctgaatcatgacgtttcactgattgtcttgtgcatatgcagaaaacattttagcctgtatgttgtcatctgtagccaatgactgtaacctctatattgtccctccaatgaaaaaagacaactgcaatatgaggagtccccttcccattcctcaactttcttataaaagcactgcaacttgtaacagactttggaacacacccaactttgttggtgtgtcttccccattcaatcttcaaatttggctttcaataagcctttatcaatttccgcctcaacagccttaactttggtcgacagcagttaagatccttacccaagatcatacagctagtgggattcaaatcaagccagctgacccaagagcaactgttgcccatcactatactgcctcccagatctgtgatataaagaaataactatagttttctggcagtgactaaaccatctaccaagcagaggaccactagttcaaatgccttggattgcaaacaccagagagtggcttaagcaaaccacatggttaagcaaaccctgttctggatcacatcattagcagctagacgtctagctatagctattaaatcctaaggtttacaatttgatttctatcccatacgaattagccagggtcttccctcccaaatctttcagtcaatctatagtaatttcaccacactgtgggtttggcaattatccaaataattgacaccaaaggcaagaaggggtgaacaacaggatgggcctcccggcatctcctgcagcagcacctggactggattctaaattcctccttccagaaagaagctgcatcccagcccagatccagctgagagccacagctgccaagaggcagtcggagctctgggcacctctctgtgcacccaggaagccccaggaggacttcatcaagccaagtcgatgcctcactcagagccccaggatccctgactcctaaccccacagtgacctggaaatgcctggtgatgccagaagcagcgctttccaattctgaaggccctcaaaatgcttgttcagcccaccttcctcctttcctggggcgtgggagtggtggggagatgagaggcagaaagatgaggacatcatcaggaggtttttccttactggaaaatgagaggaaatcctctttcactacttaaaaatcaaaaggggctgtccatattcctctggcaggggtctcccatcatcccccgcgaggcattcccattatcccctgcggagctttcccatcatccacagaggcccttcccataacccccaagtgggaagttcgcgcaagtgcggctctgcagggaggagggagggccgaggggaaggccctcgagagagtggagggcaacagtggccacggttcctctgtacttcgtttcttccgtaagaaatgatcttcttgtccttcttaagtataaatggagcgatccatttccttttacccattaaccccttcaaaaagaagaaaaacagtcccaggctggccatggttgatctctgcaggggcgctggtcagggtgccttctgcttcctggtgggatggcctaggccggggaaactgttgaaaccaccctggggctgccttctgtattttccacaaccttccaggcccacctcccagctggaggccctgcagcttggcagttgccatggcgactgagtccctaagtgtgtctcttctgagctctcctggacagtgtggagaaaaggccttaagaactgaggggcttcagtaaaatgcaaacagattttttttttgtaggcactgttcagataaaaagcagggactttcaacaaaatgagttcaggtccatcttaactatagaactatgaggttgtttattagaataattgtactctggtaaatttaccaatttcatatatatgcatatttataaacaaacatattagagtatatagatagaaaaagttctatctacatgtagaatcgaaaactttttaaaatagtgttggtagtatcacacattgccatttagtggatagagacagacccgagattggagccctagctccgtatacttctttctgaagtcagtctactcatctgtaaaatgggctgttgtgaggtcaaaattagatattcataatgagagtagcatagtgcctagcacaaagtaaagcacttagtaaatgggagctattactattaattgtactgctgttaatcttacaataggttaagcaccttttgtctatcagtatgtttgggggggaattttaactcaagtttatcttaatcgttttcagtcgtgtttttttcttgaaaagaatcaaactgccaaagatgattctgtcagttgtttgtgacaatcagaagttagtctgtgacgaacagattagttttaatgctcatattcattagcactaatatacataagggtggggagagactgaagcttctggaaatatatagacaggtagattcttaagcgtaagtaggtatttgaactgtttgtggattatgtctcataaaattggcacccagcaaggaggaaaatgccagatacacacacgcccatacctgaggtatgtaggtcaatggaaggctattgaaacacagttgtcaagagagaaatgtaaagtatttttcacccaggaagtgagattattcagtgatgcatcaaaaccagtagggaaaacagtttagtggacaccagtgtggagacgagatgtcagaaaattggatagactcgaatttcacgttgggtagcaactcaaggacatagctcagtgcttggcacatagtaagtgctcaaccaacacaggtttatcaaattaaatgttagatattattttgcaacagagctgtgctttatgcagcagtaggaaaagagaaaaattgacgtgaaattttttctttttcttgtttttttattcttaaatcacactccattttccgagggctctctcaggatatcagttgcttaactacgtctgagtgtcttctaggtcgagtactaggggattacaaggaaatgagaaagaaattacagacccattggggggcaaattctacattaatctacactgttaaaaaaatttaccagggccgggagcggtggctcacgcctgtaatcccagcactttgggaggccaaggtgggtggattgcctgagctcaggagttcaagaccagcttggccaacatggtgaaaccctgtctctactaaaaatacaaaaaattagctgggcatggtggcgggcgcctgtaatcccagccactcaggaggttgaggcaggagaatcgcttgaacccgggaggcagaggttgcagtgagccgagattgcaccattgcactctggcctgggcgacaagagacaagagtgaaactctatctcaaaaaacaaaaacaaaaacaaaactattatgccttctggctacatgttaatccttcattccaaagtggaggtcactctttcctactggtggatatgtaaggctggttctagttttgatgctgcagatagcctcactctaaccagcagttgtggtgggagatcctgtgctacatggggctgtacttttcaaggtctaagggtggatcagattttctagaaaagggacagggaaaaaggtggcatgctgaaccacgtgtccatgattttcccagaataaggctccccctacccaacttacaggaaggtcatgatcaaataagataacgaggatgaaatgatttggaagtgctatagaaatgtaacgtgtatatttagctcaggttttaaaatcttttaattatgtaacatttgatgcatgcaaaagaacacatattcacgtatgccagcaaagtaatacagtgaacacctgtgaacccctgcccaaagtaaatagatgaatgagtaaatgaaataaatattaacatctgaatgcatagatctttgtccacatctcaaattcagctctttggattgcagctttatagaattgagagattgctgagcctaaatacatgttgctgcattgcctccgagaatggccggacctatccccactctcaccaaaacagagtgtgggactcactgctccctcgcctactgtaagtcctatttttcttctttgctaatctgatggacaggcagtgtctcatagtgactttagtttgtattcatattttctcgattatttgagaagataagcatttttccccaaatgtttattcttcacctatgataacccttgttaattatttagattagttttttgcaggccactttcatatatctgtatatgttgttttctctttctgaaatgtgatgcccatgtttctctacctggtgaacaatttgtcaactttaatatcttaccagatgtaaccttcctagggatgctgtttctaactgctgccggccccttcttaccatctctctggttgtgcttctgacgcattccctacacaactggaacgtgtttccaggtcagcctccctaagcacctcccaaggcctccaccccacagtgtcgcacagaacttgacacataccagatgctccaattattaaatattactgagtacttttagaaaattgggaacatacaataaagtataatgaagaaaataaagaaaaccaataatctcacttcccaaagataataactactgccattttggtgtgaatcctttcatgcttttaaaatgcatatatatgtctatttaattgaaatcattctatttgtcacttacattatcacatgtcattatatggtgcacatgtcaaaaaaaatttccaaagtgttttaaagacaatagtatttcaccttaaggatataccaaaattattatgtcacaaatgttggataagagaatgaatgaaaatctttaatatgaagttgaacaaggtaaggggtattacttaaggaaattatactcctttttttttttttttttttgagacaaggtctggctctgtcatccaggctggagtgcagtggcatgatcacagctcactgcagcctagacctcccaggttcacgtgatcctcctgcctcagcctcccgagtacctgggaatacaggtgcctaccaccacacctggctgattttttgtattttttttgtagagacagggttttgccatgtcgcccaggctcaacaacatgtggatcaagagatccactcacctcagcctcccaaagtgctggaattacaggtgtgagccaccacacccagcctccattttgtttttaagaaaacaatgtgtcgggtgtcttttctcagtatgtcattcactcatgtttcttgggtgactaccagaagttcctcagctctgggtactgttgctgtcctcctctcgtggcgctggcatacctgcttgtttgaattgcctttctcctctcctcaagcccatttttaattatctagttactaggacaagcatctaaatagttgtggagcaaatacagttatcggaagagctaaatgaaccatttccctctccctctacaaacaggaaagccagaaaggttttaaactggactggtaattttaggttccccagagctggctttgtgctatctgaccactgaggccctgcactgggaggaaccagacggggcccctggcaaccacatccgggtggtactagaacatctcagtgctgttatctatgaccccagaacagagtctcagttcaggggccctaaaagagtttccccactgaacaagcatggaaatgtgaaaatacgtatttattaaacaagataagtgaagattgtttcatttagaatgtgattcactaatgcatttctttgattacttagttatcttggtatgttcaaaatattgtggctttctttttagcagttctttatattaatacatttaaagagggtcccagaagggcaccaggctttaggatggctagaaatggggacatggcctggtcattttgggtcatcttggccctggtctcagttccaaggatgtgttggagagagtataggggtgatagcttaggaaaactctccggagtgaagaggcagcttggctttattaggttgttttcttcaccttaatcctgaaaaccttttcaagctaactggcagcaagttggacatcgaggtatgtgtttagttctagaaacttctctatgtgtgtcatgatattttcttttgttactatcttaagtcatgcacatatatgatatgtattacaatgtagtagaaaaagtaaaatttatacagtaaagggagaaaaaggacccagaaagcaagaactcattagcctgcctgtgcccagcatgaccctgcaagacaggcgtcttactcccaagttcactaccagaataaatgaattaattgactctaaaagggttttgagaacagtttcaagttattattgcttatgcttcctcccctacattccagatcccacaaagaagccacttcttgggctgacctttttatcatccacctcaaactcaacaagggcaaaactgaacttcttctctccgctttatttccttatcttaatgaagggcccacttgctaccggtttactaagccagaatctgaacatcatcaatgtcagggaccagttctttccttcccccttccccaaccaatctccaaatcctggagagtcttccttccaaattattccaaatccatctacttttttccattcccactgcttcttccttagtcaggacaccatcattttctgccaagaagacgccaacagcccaggtggtctccctgcccttagtctcactgtcttctaatctatttgccacactgaccagaataatcttttaaaaccacacatctaatcacgttgttcttcagtttaaaatctttcagtagtgaagtccagactccctcattcgattattaggctctgaatgatgtggccactaagtccctccccagcctcttctcttgccttatgttcacacaccacactctctgctgtggccataatgactttcagttccccaaacccaactttctgtaggattgctgggcctttgcctatgctgtttgttctctgcttggaacaccttccactcttcttttgggtaactcgatgccttctccaggtctcagctcagctgtcacttacacaaccccataggcaggctttatccccaacccttgtccacagtatcctccaggtgactgtgtctcccaggtgggtagcccctgaagtaaccctctacactccatcactgtcagagagttggaaggctggagaggcatgacccctcagagtcaacctagatccttgtggcttcagcccccagcaggtagggagcccaccaagcttcaactctacagcagagacacagccaaggctactggtatgtgcaaaacattggcttgtgaaaattacagtatccaaaacatgattttttttctaaaagagctttttaaattttgttttctaaaagttaaaaccagaaaatttctgatttctgacaggttaaggatttaggggaatttttaagttatgtgatgtgaggttctctgtagttttgtaccaactagattgttcatttcctaagaatgaggacctctcctattcatctttgtaatagggacagtgtcttacagatgaaaacattcaatgaccctacattagaggagaagaaactggagcacaaattggttgaatgttcccccatgtgacacatttaataaggctaatgttgttgaagtggaggctgggcaggcagtaagaggattcccttgtatacttgcacggtgaacatgagtactggcatcgcaggcctcgttcaatgttgatactcttgaatttaaagtggcatttccatgtactcttacagatgttccttcatttgccatcagaaggatagctgtgaagtgatatataggaactttgtaggcatatttgatttttaaacctctattaactttgtgtcaaataatcaaagcttaacaggatttatattaaggatggtgagagggaatcaaacttcatttttagagaaaaatagcaaatcaaaataagctgatgaaagggactttgtggttctctccttccttcagctcctgatatgaatcctagactttttacatattcatactaattagctgtgctttccaataattagagtagccataagcatttgtacactaattcacagttcctaaagcattcttaggaatattagcataaatgtttattgaatgtctcctgtgtgccaggcatgattctatacatgataaggattcactgatgaataaaaccggttaaaaaatctctgctttcatggtgcctacattctaacaccttactttccccattcatccatacatcaaccccacagaatcacactaggaaaactggagttcaggagagtaaagtgactttcacagggtcccaaaaatagtaagtttggggtcacaatttgaacttgtcactccagattccaagtcccatgcctttttttttgctaggtcagtattcactgtggaatcataactgatactcaaaaacatgatcttgagtaatattcaggaaagaatatcatattcaataagttgctttttttttctttttgagacagactctcactctgtcaccaaggctggagtgcagtggtgcgatctcagctcactgccacctctgcctcctgggttcaaacaattctcctgtctcagcctcccaagtagctgggattacaggcacatgccaccacacccagctaattttttgtatttcagtagagacgggatttcatcgtgttgcccaggctggtcttgaactcgtgagctcaggcaatccacttgccttggcctccgaaagtgctgggattacagtcatgagccaccacacccagcccaataagttgcttttattattgagttacataagtcttttttagaaaagatttaagatacaagagttaaatactaatggtcttaaccataagagttaaaactataaattaactggaaaggagcagctgcctagaggaacccagggcatgcgccttctgatggccacagtgagtgctgaggtcttcagtgtaggctgtgagggggactggctgcctaaactgtcagcctgtggtaagtagggtagattaagctgatggagcagaaagcctcaccatccaaagccatcctttcccagactccatgtctggtgggaatagataggcaacccgggaaagagtactaaagtgtgtgtcttagtccttttgggttgctataaaggaatcctcgaggctgggtaatttataaagaaaagaggtttatttagttcatggttctgcatgctgaacaagaagcatggcaccagcacgtacttcttacgaaggcctcaggaagcttccattcctgatgaaaggtgaagtggagcaggcctcacatagtgagaggggaaggaagagagagagcatggagggaggtgccaggctccttctaatcagtgctcacagggactgatacagtgagaactcacttactactgagaggatagcaccaaaccattcctgagagatctcccccgatgacccagacacctcccactaggtcccacctccaacagtgggggtcaagtttcaacatgagatttggaggggacaaatacccaaacaatatcagtttgataaagaggatatgagtaatttcattctcccatcagacagtgtttgtttagaagaaaagtaccatgtccataaatcatcaaatgctggcccagagggaactttaaagaacagccccttgatttaagccacacagtttaccaaactataactggactgaagagtacgctcttttttttttttttttttttttttgaggcggagtctcgctctgttgcccaggctggagtgcaatggcgcaatctcagctcactgcaaactctgcctcccgggttcaagcaattcttctgccgcagcctcccccgtagctatgattacaggtgcccgccaccatgcctggctaatttttgtatttttagtagagacagggtttcaccatgttggccaagctggtctcgaattcctgacctcaggtgatccacctgcctcagcctcccagagtgctgggattacaggcatgagccaccgtgcctggcctaagagtatgtctttttgcagaccccataaaaattttccaacttgcttatctcatgtatttgcactagctcaactgcaagaatgactccttagttgatgggtcagtttcctatttccacatacctgacctcattctacctataggcataaactcaagaggaatttacaacagatgggctcaggcaacaagttagccccagagtggagctcagctacagaggaatgcttcactgaaagaaatgtgagtccctgaatctgattcaagcctttatcaagtcctacttcagttagaatccagtttactccccaaatacccgtgagcactctctcagttactatttcccttgctacacatatagaagaaaagcaagaaagttactctgctgggaaacactgccaaggggtcttagaagcaagaaaatttgcctattttatacaggtagtttaaagagaaccacccttataaatgggtgtttgtccccttattatttcaggacacttgaaagctcctctcctccaatatgtctctaattcaagtatcacagtgtctaaaattctaccactaaaatgccattacctaaattaagcacagccttctgtctttatgttgatatttctttaaatatcatgccaatagttttaaaatcaaatgatactaaaggtatataacaacaaacagtcgggcctggctttatcccttcaactcctctgtctcattcccctaccattttctactcttttacccatttcttctggtagttccctatatttctaaataatatgagtaaactatgatttttatgtccaattttaaagcttttctatggacctctggttttagagacaacatctagttctcttacatcccttgccacttcccctgatgctgtaggacagacaggtctgtcccacccacggtgactcagtcattgttgttcatggccgctgcccgttcttcacgatcaaggaggagaattctttggaggaaacagagctttcatacgtgaatcgactgggaagcgagtcaaaagtactgcaactggaagtgtggcatggggagggggccgtggccagtctcctcactgggctcctgtaggactgggaacgcctactccttcacacctaattatgtttgctggattgggttatagttcttcagtgtgtggactcttgtcagttttatatccgtaggccgagcacaatgcctggaatacagagcatgcttaataatcagaggcttttcattgtatttcttatcaacaacactagtaactgaatataaatcacccttcctcgccagtcagtgcaccataccattagaattcttgctttttgatcagtggagataaaatgagtttcttttctccatgttaagtaatcaggttctgattttcccttttctttctctctaatagtgtttaatgctctaatgctttctaagcatgaggtattttcttgagctctgaagcccagtatcttcaaagcccccttcagggaaacctcagttccctgtcagtcaaggcctgtcactggctttgccttggccttctctgggagaatgtctgctccttaagttgatggcatacaagttgaggtggggaaaaattaaagtgtaggatttctgtaggcagctaatgttttattactggagtgcagtgatgcgatctcagctcactgcaacctctgcctcctgggttcaagcaattcccctgcctcagcctcctgagtagctgggactacaggcacacactaccacgcccagctaattttttgtattttagtagagatggggtttcaccatgttggccaggatagtctcgatctcctgactgcatgatctgcccgtctcagcctcccaaagtgctgggattacaggcgagagccatagcgcctggcctaaaatgtattatataagcatcatagtgaccacaaaacaaaaacctgcagcagatatacaaaatgtaaagagaaaggaatcaaagcataccattacaaaaatcatcacattagaaaggaagatagtaagggagtaacaaagcaacaaaggaactacaaaccgccagaaagcaattttttaaatggcagtagtaagtccttatcaataattaatgtaaatggattaaattctgcaatcaaaagatagaagtggctgaatggatattaaaaaaaaaaaatctaggtgctgcctgcaggagactcagctttaaggatacacataggctgaaagtaaaggcatgggaaaagatattccatgcaaatggttaccaaatagagagcaaaaaagatacttatatcagacaaaacagactttaagtcaaaaacttcataagagacaaagtcactatatcatgataaagagataaattcatcaagaggatataacaattataaatgtatatgcacccaacatcagagtacctaaatatatattaacggaactcaagagagaaatagcaatacagtaatagcagggtacttcagtaccccattttcaacaatgaatagatgatccagacagaagatgaataaggaaacagtgaacctgaataacattctagagcaaatggacctaacagacatacagaacactccttcccccagcagctgaatgcacatttaaatgtacacagaacattctctaggatagatcatatgttaggccacaaaacaagttttaacaaatttaagaagattaaaatcatatcaagtatcttttctgaccacaataacatgaactagaaatcagtaacaggaggaaaattggaaaattcacaaatatgcagaaattaaatacacacctgaacaaccagtggggtcaaagaagatatcaaaagggaaatcagaaaattccttaagacaaattaaaatggaaacaacataccaaaacgtatgggatgcagcaaaagcagtactagagggaagtttataaagaaaatgtggtgtatagctgtatctacacaatggaatactatttagccttaaaaaagaaggatttcctgtcatttgcaacaacatggatgaacccggagtacattacactaggtgaaataagccaggtacagaaaaacaaatataggccaggcatggtagctcacttctctaatcccagcactttgggaggctaaggcaggaagactgcttgaacctgggagttcaagaccagctttggcaacatatcaagaccctgtgtctacaaaatttaaaaaattagctgggcatggtggcatgggcctgtattctcagatactcaggaggctgagggggaggatcacttgggcctgggaaatcaaggctgcagtgagccttgaccattgcactcacgccactgccctccaacctgggcaacagaacaagaccctgtctcaaaacaaaccaacaaacaaacaaaaaagaaaaatatgcatgacctcacttatttttggaatctgaaaaacttgaactcagagaagcagagcatataataatggtggttaccaggggcagtaggtgggagaaatggggagtcgctggccaaagagtacaaagtttcacttaggaaagatgagtaagttctggagggctaatgtacagctctaatgtatagttagtaataatacattgtatacttgaaatttgcaagaagaatagatcttaaatattctcaccaccaaaaaaaaaaaaataatgtgaggtgattggatatactagcttgactgtggcaataattttacaatgtattcatatatcaaaacatcacatcctatactacaaattatgtaatttttatttgtcagttatacgtcagtacaactgggtgggggggagggggggtgggaagaagctgtctccatatgaggccgaggtgtcctatatatcctgagcttgtattatcgcctttcaagtgtaaaacctgtaggtgatgggatgcccgaaaggtttgaaaatcaggaatgacaagatcagattttgctttaggagggcaacttgaggcagcttaaagagtggattgcaggaggtagaacttggaagtgagaacgctgttgcacaagtgcagtgagagaggggtagcctcgagccgaaccaatggcaagggccagggctggggagaccattggagagaggggtgggagccacactgggctatcaccgggaatggagagctagaaaagagaggagaaagcactggcacagggggcctgcggagagaaagaaggtctgaagaaaacctggccaaaaggagaagactggagccctgggccatcccgcttgcggaatgaggggccggcgggcttcctggggctgaaccctgcgtggcaaagaagtgggcaggttttctttctgcctgcagaaggcttctcaaatgcctaacaaagtgatggatttcacgcagcccagctcagcaaagagagacacagacatcagagtgttctagaaacaaagcagggccccagggggaaactgcgaggcctagcagggcaggggagccaaacacagggaagaatgccttctccattctccagagggaagctcaacgtgcctggggaagggtgcgaggggcactggcctgttgggacatttacagccaggcctcgggttggttttatccttaaacattgttttatccgggggcaggctttttccccggaaaatttccgctctgcctcactttgctcttccccgaggagtgggctgggagccccctctgctctgaagccatcctgggggtccactgtgggtgttcggcagtagcttctaggggactggccaggcccctccctggggctgcctaaggagaagagttgtttctggggtgacgtgggagcctgtgtgccagggcactggcccgcaagggtaagaacccggcgggctcccgcagcctaacagggagctgcctctgtcacgtgcctgcgaggtgggacacaagttggcttacaagttggttcgacatagccaaatccgcgtgccgcatttccacgctatggagtgctagtcttcatgattgtgccccttgacatgacacaataggaatagaagccgggaggccaagcaaaggccctctttgggggtgggggcgcggcggcatgtgaccctcgccgcctgtggggaagacctgccttgaggacagagcgccaggggtgcagaggccgcctgggactgcccggaggccggtggggagcgcgccagcgaaagcccgtgcgccctcggagccggggaaggcgcgggccatgacccgggttcgcccgcaaaggccgggcagtgccgcaaggcgtgggggcgcccccgcccggtggccccggggctggtgcgaccctgggcacgccggggccggggccggagccgggggtcgcggcggccggggagggggaggagccgcgcggctccgccggcgccccgcgggccagggaaagtgaaagggcggcggggcctcccgcgcgccgctccaggaagtcgcgagcaggaagcgcccgcggcggccgggccgggctgggctgcggagcgcgggcctcggcggcgcaggtgaggcgcggggccggggccggaccgggaggcggggaccccccgcccccccgcccgcacctgcggggcagccggcgctcaggcgccgcagccgctcagcacctgcggcgccctcagggagccgggcgcggggccctgcgcactcggagctcggctcctctccttccttttcttttttttcggggggaggtgggggctggtttggatgttttccgagagccggggacggtctcaagctattttcgcggagggaagtctttgaaatacgacatctagaagagtggccctcggcgacaatgccgggcgttcccggaccggggcaacgctgggattccggggaagtggaggcagagggagcgggcacggggccggcagccgctccacggagtccccggcaggggcgagcttagctgtccagccgggtcccctgcccaccccggcccgggccgcggtgacagctgagggtccagagagccggcaggaggggaccctgcgcattgtctgccgcgatggggacgtgggcgtgcccgcggaattcacctcctccggggaccagccgcccagggaggagccggcacagaacgctggctcggagcgccggcaccctgggcctttgcgttgtttgtcggctgagcagctggttcccggagcccgtgggcctcctggccaatgcgagtgacagcgaccttctgggtttataataaagggcttgacgcgccggaaagtcccctcgccgctggccaccagccttccagcccttacggcccacgccgtaatcctggtgaccgagaaggtacgttcagtctaaggatttgcatttgaacgaaggatactggccaagccccttaccacccccactccccgctaacaccccagcccgcggccccaggtttgaatttccaaaggaggaattgctaaagcctgccctttccgggtctcccttagctctttgcctggaaggtgcctgcctgcctgcctgccggcccttgaacttaaatcgtctgaagttgtgtaagtggataaatattttagacttcccccgttgtttttttattaatcccctttgagagcaagcttgaaaacacctggccccagacctgtgattcaccaagtcattttggacctgcatttacacgttctgtttcatgcagcccacctgtgatgttctctttgttgggggttggaggcaggtaagggaggtggtgcaaatggaattcaggttccttgtacttcagccaaggggaaagagatagtgaccattttcattcatctttaatatggaaagcgcctttaaaagcaaaaagccatagaaagagcacactctggacaggaagttgtattctatctcgtaatttaaaaaaaagaaaagaaaaaatgcatgaaaacttttggaggagaattgcatttctcacccatctttgcctgtaaagtgagacccagttaaaaaaaaatgtcataaagtagattatttaaaatatctgtggggccgctttgattatgtgtaatgccacctcagccctaaaaagactgaggaaccttactcctgctattgctcacttcctatccccattatttgagtctctgcagattacttggaaccttctaggcagcgcagatcacatgtgggtgggtctgggagtggagcttgtgaatgtttctttcctcagcttattctgttttacagttgcctagggtgggttttttgaagaaataggtataaaaccatgtgtctttcagagtctgtttgtttttttaacttttagtttcaggggtacatgtgcaggttttacaggttgtaataaagatgctctaatgggctgtttcctaagttactatctttttatatttttttaagacagggtctcgctctgtcgcccaggctggagtgtagtggtgcaatctcagctcactgcaacctccgcttcccaggttcaagtgattttcatgcctcagccacccgagtagctggaattacaggtgtgcaccaccacgcccagctcttttgtgtatttttggtagagatgggattttgccatattggccatgctggtctcgaactcctggcctcaagtgatctgcctgcctctgcctcccaaagtgctgggattgcaggcatgagccaccatgcctggcctaagttgctgtgtttgacagtgcaatgaaactggacattctgccgcttttcctccctggaatggtaagttccaggggggcctgtagagagtgactttttaaaaaagtatctcttctttttatgtacttgggcagtgtgccaaaaactgggtttaaaccaagtgatttgctcccattctgctgccctttctctgcaggggatgggcaggaagaagagtggctggagggaggaggtggctcagagaaacaggacaaactggaatctgccccacttatccagctgacccaggcgagccgcctagcctcatttttctcccttgtgaaaagaacgccctgcctcttcagggtggtcacggggctcaaatgagagcatgtcagtcatggttcgtgcttccagaggtcttgacccactcaaaatgaagtggtctttagtggtgctgcacaggctagggaggaagggcctcattagttgagctcttaacatcccaaatgtaaaatcactgtctttgcacatcttaactgcactcactatgagaatttatagcacttttctttcacccattttacagggaaaagaatccatcattgttttaaaaagaaatcaaagaggttttttttcccttcttgatttgtcagtgccttctgggcctttgatgttgttgtcacaggttttatcagagttggaggtttttgatttatttagtagatggcaatggaatgtttccagacacgctggacatggagaagcagcacttgagaggaagacgtttgcttctgaccatccgtttccagacactgttgaaccaaattctttactctgaagttgtcatcacaaagtcatttcccagagtagatccagacccattctggagcccacccattttgagcaaaatattgcttaaatctagaggtttgagcagacgtggttttgaagtatttgtggctgttcattcaacgtgagtttcttgagcacgtggtctgtgctaggttctggacaaggagatggaagtaggaccttgccctgcagtcccgggccttcctcttttgaatttacaatgaggataatatcagctagtgtttgttgcgcatttactacgtaccaggccacttatcaagtgcttcccataggttatctcattgcatgtttataacaacatggatgctatcatccccattgtttagccttgaaggagagggagcagaaaggttaagtgacttgcctcggcttacacagcccagggtcagccttggaaggaggaggtattggagtggggtgaatcccacctattcaggccctgtaggacctaggagaaaggtgtagttctggctggagcagatagaagagatgaggggcggctcctgggacgaaagctcagcagggattttgaatctttttgtaaaaggtggtataagggaaaaatccttggagaatgtgcatttttggaagctcactttcgagggaggcaaaagtgaatgtggggaactgattggctttggaggacgcagtgactcaggaatgtcatgagtttgacattgggatgggagaccaggcctgcctgctgtgctgggccccttctcagttctctggcctccctccccattccttcctatattgctctgccttcagccctgacttcataatcaggtcattttctgtgacctctgaggtgaccacaggagatgaaaaatgaagaggcagacgaggcaaattcattcctcctttggattcaaatggcaaagtcacaattaaatgattggtttgatctgccctcttgtctaggcccacatttctctgtcactacggttcaaaggtggcctggtccataggggtggaactgaggcagtccagtgccctggcatgccttgatatctgggcacatagcgtggctgctggacacatacttggttttgtgaatgggttgatctctagatgcctcccagatagagatgagttccttggttcctttttatccaccatcagaacattatttgaaattcatttccaggttctcagaacaaaccgcctcaagggtagatactccacctcactccccctcttcctagtaacactgctggtgggggcccctgcttgtatcagacgtgcagctttgatcaggactgggtactgctactgtacgtgtgtggttacttctgccagtaacgctgaaggtgtgaatgtcacgacactggactctgaatgcctctcctcctccttgtagagagcagagccactgccagaaggaaggggacaagacccagcaggacaccttctttccacgctttccagcctgtgggagcggcaggggcaacagagagaggatctggagccaggattaatgactcatttatgaagcatcttattctgcgaccgaggctcagtggtcagtggcgacgtaaatggctcgactccccgctggcattcgcttcatcatctcattctccagggatcagtggtgagtcctggtggggcaggcccttggcatggagctgtgtataggtgagggctactgtgcaggtagttgtgttgccccagtttcattataaaacacataaaacttgaatcactgacctcacccataaccgttgaattgctttttggtggtggaagccgtgacccagaacagtgctgaggtgtcctttgtccttggtactggcattgtcagatagtgtttgggctcccgcgtggtctccagtggtttctctaagaaccatggtccctacagaaaaatgaccactgactaccagcagggttagcaaatggctgtggtgaaataagcacataacttatatataagttacacaactctgagatcagatgagtggccttgccggggcagaactttcagagagaaaatgaaatgttctggtgcagcccagaatgctgctttccgttcagagagtgcctcgccttgcatattctgagaatccttctcttaggtggcctcattaattccattctccttgaaggaaacagttgacaagcccagagtctgaagctgggctccctggcctctaacttgtcctgctgacctcttctgggagaggaaaaactttgcttctaccctcgtaggttctgttttgggggacctgggaattaaactgacaaaagacagactagcaagagaaaagacagatttcaccacttatgtacgagaggtcatagaaaagtgtccctcaaaggggcatttagaattctgggcttatgcaccgtccgtccttcacaggggaaggggagtgagagaaaggtacctgtgggcaaacgaatggctttttggaaagacaagtgggccctcaagagaacagagaacagatgggcgatgtggtagttttgtgatcattcctgtttcagtgcagtgtggaggcttctcatctccagtggtaagagtcctgtttccctggcccctcctaagggacaggatttatagcagatggattcttttgacttcttttggggaactctgcttttcagtagctaagagaattcaggaacgcaaatgccttctgctcaaaatgattttgatgccacagcggcagattctgggcccattcatctcctccacgccaaccccctggcagcccccagccctgtgcagcttctcagccctgctggttggtggagcatccacagggtgtctcaggtttgatttgagggcatctgtgttcttcaaccagattgcttctcttcttgacttatttcatgtctgctgtgagtctagccacaagtgcctgaacacttaggttttatttagtgaatgtctagcttcttcattttgtaagtttattttgatataatttcaaactcacgtaacttactaacatctgtaagaatgttcctgtagaaccgctgtatgtcaaagattaacatttagcctcatctgcttctctccctgcccctccacagtgtgtttgtgtgtgtgtgtgtgtgtgcatgtgtgtagatgtatgtttgtacacacacacttttctgaaccacttgagagtaagttgcagacatcataccctcttatttgtaaatacttccgtgtgtatttcctatgaataagacattctcttataaaaccacagcaaaaagatcaaaatcaggaaatttaacaccgataagatactgttatctaacccacagtccatgttaaaaacaatatcaaatgtcaaatatctgtgatagcatttcttcttctgttcaggatctagttcgggttcatacattgcgtttaattatcctatgggtctcgtctcttcatctagcactgttcctcggccttttttcatcttttctgaccttggctttttttccttcttcttctgagacaatggccttgttgtgtttgaagagttcaagccacttattttatagaatgtgccacattttaactttgttatttcctcatcctcatgattagattcagattatgcatttttgacagaaatcccatagaaatgaggcagctttctctttaatggagaaggagctataggcatgggaagagggaggggaactggaaggaactgagtgaggttggattggaatgaaagttctcgggataaactggtgatggtcgatatagaaatagagaagggtgtgtgtgtgcgtgtgtgtgggtgtgtgtgtgtaaaatgcaccccgctaggaggtcctgggaacagtaagagcactaaagtgagcacactttggtccgggatcttggtttctgcatggcatctcccactaaaaggagccaggagtccttggagacctggccaatgccaggactggggcagggcaaggaatagatgagcccagaacatcttgtgccagaaaataaggaagtacttacaaacaaagggactctgacttgtcaaatctaggacaatctgagatttacaataaatgagactcatgaatgatagcccattgaatagcgtaagattcggcgagtcctactgatataactaaagaagtaggagaaatgcacgctcgccgtacagtggaagctggccgctaggtggagcggggatgtggagccgctgcagggtacccagcgcaggcacagaacgccatggatgcaccccgtggggcggcagcttgaggaacaggatatctacattatctcaaagcaggttcccagaaattccatattcattacttagagggaaacgtagtggtttcactgaggaactatgaggcagacagcactttaaccaatgaccaacgtcagtgtcactgccctcctgcaccttctgacgggatactctgaacaggacatggcatcgcttctctgtctcagaaaacatagacagaattacaaaataaaaaaggattttgggagggctgtttggcttctgggggtttgagcccatccatgctgcagagtgaagcagaggatgtctttggactaatttctgcaccaaatcatatcactcagtaattctcaaaagtgtttctttattccttatttgcatgtgattgaggtaataacagtcaaacaaggagacagatattttgcatggagcctctcaccctaagcaggctgccattcacctgagaacacgtggtcttccagaacatctctgaggaggcccagaggggcacccccatctggtgctgtcattgctgagacctgcttttttgctagaaatgtgggatttttcatattggtggaagccaagcatgctataagtagtcataactgcaaaaagtaagcagaacactgaggagcagatagattagatcatttatttttttattgtatttgttttatattcataagtctaaacataacacaaaacaaaaatgaaaggattatattagcctcctggggctgctgtaacatggtaccacaagctgggtgtcttgaaacaacaggaatttaccctctcacatccctggaggtcagaagtccaaagtcaaagtgtcagcagggccacacttcctctgcaggctccggggacagacccttccttgcctcttccagctcctgctgctgccgccgttcttggctggtggctgcatcacaccagtctctgcctgtgtggccacgtggcctcccttcctgtctctgagtctttgcgtggccttctggtgaggacgccagtcattggaatgagggctcactctatctaatatgacctcacctgagctaatcatgtctacatgaccctatttccaaataaggtcacgttctgaggttttgggtggacatgaaattatgggggatgatattcaacccagtacaaaatgaacaaaaggaaacatatcatccaaaacatctgctttataaatgataaagaaaacgtagatagaattacgaaataagaaaggacttcgggagggctgtttggcttctgggggtttgagcccatccatgctgcagagtgaagcgtctgcctacccagaggccaggcgtatcggggtgacaaccagcaaggcagcggcccgagtgtggctgccgcggtttagcaatagtcacgggagctgaagtcagacctttcaaagaggaaagtctagcctccagccactgcgtcccccatccccaagccccaagtcctaagtacagaagatgaagaaatgagagaggaaagacgaatttggaaatagaagtagagttggcctgacaccagctaaataaatacagcgttttcctcttcagtctttaggaacattccagtttgctgtgtaaatggacccttcacccaattctacaggacggcttctgtcagcctggctacaccgtggcagtgactcttcccaaagggtctcattcattaaggtgtctccctccacacaaggctgaactaaaggttccagaggcatgtgctgccccttgtgtgctcctcagtgttctcagggcatctctaggcgtgtgctgtgagcaccagccgggagtcaccccgcagaggaaggcaggagcccagaacgcatcaccagggcctgatcacccaagcagccctgaccattgggaacgcggtgtgtgtcggggcctcagcactcttcagacctcagcccgacaaagggagacagccttccttctgggctgtctgggtggagagtggagatgtgaacccacagcccataggacagagctgctcttctcaaaatccttcctagctgggtgataacacctgtagaactggcactgtggttggagaatcctcctgcatggagcaggagagatggtccatggacttgtctgagactggggaggtgctggaggcaacttggcctgagaactttgttcacctgttttgaggagattggagaaggaaaccctgtactccagtgagggccgatcagggtcacccatcagccttacttgccctagtcagctccagcaggtggggtggaagtgaccagtttgtcaagctgtgggctggacaagtgagcattgagggccggtgaagcccagtggcctggaatcttcctgcaccagcagtcgaaggcgtgagaagcagtggtggcctaacagagagcttcatccaaagcgctgagactttctttccttgccagaaaggatggttttcagaaacacgaggacagaggccggggcttctggagcaaatccactgtacccacatagcctttgttctttgggctttgggataaatgataggctcgccttttagggtttcgcttttttcccatttggcccttgccatgggcttggagaggaagaattggagaaaggccattggaagatagttccctgatgaagaagagagcactggggaatttctgtcttcagtcagcaggtattctgcgagttggtttggtttggttccttccccaaaggcacaggcattccaaaggttgtagttttgtgtcacacggagccaccaacctttctttcccacctgaaatatggcctttttttttttaagaaaaatctggaaatatttatttgacccctactttagctggtgaccagagaagaaggcagctctgggatcctaggattttagttacttgtggaaagcttccctcggagtaaatcacaacattaaaaatgtagatgcgcagctgggagaagcaaccccttatcccagggactctcggaaacgctgcctttctttgtcctgtgtaggacgccgccttaggtaattattgattcaggttgttggtggcgccatttgaagtctcttcccaggccacaagcaggacaggttctccagggtagggagatgtgcctaggacacagaagagctgcccctcgccttccactcctgtcaaatacttctttctcccaacccattttgttgccccaaaaagtatttttctatgcggtggttgagactcttagactggagttgccctttgtcttctttctaaggcaccttcttttcttctttcttcctcacactcatgctgactctttcggctgcttttctcccagccaaactgagcgaggggctttgtaccagtgtttctgtcactggcctattgagagcctgccagcgtcactgcctttttctctttgagggccgtgaaatatttatatgtctgccttgcttgtgtgcttctgaaaagttgcatagaaaccaaagagccaaaaataaatatgatcttaattgcccaggatagcaggctacgccagaaacttgtggttagttttgttgtaaactaaacatttcatcgtgcttgttctgctttgtaaactcaagtgtgcatctcgagtcccaggtttccctttggttacggtttctttaaatagatgaatgcttttgatattgtgacgtaataataagaaacatgcttttggtctctggccctggttctgggcacacagctcctacaacctttagtgctgagtgtctttttgtttgctaatgaggtgactgtggcgggccccaggacaacctcctgggggactggttgccagggcaaccgaccacgtgattagaggttgggactccacccgtggacctctggggaggggagggagcccgcagaggtggagtggatcaccagtggccggtgttctgctcgatcgtgcctgtgtaatgaggcctccacagactccctcaacgacagcgtttgggggcttgcaggctgctgagcacggggaggttcccggagggtggagccctggcgagggcacagcagctccgagctccctgccccatacctcgccctgtgcatctcttcatctgtatgtattctttgtaacatcgtttataataaagcagtaaatgtgtttccctgagttctacgagctgctctggcaaattaatcgaacctgagaaggggttcttgggaaccaccctgagagccagttggtcagaggagcaggtcacaacctggggcttgttgccattggcatgtgaagcggggcagcctcggccggagccccgccctgtgggggctgatgctgactcctggaagacagtgtgagaattgaattcacttagaggacatccagtgtcagctggagaattgcttggtatatggggaaaacccctacacacgtagtgttagaagtatggtatgttgtgtgttgtgcatgagggtaggaaaagcagtctggtttttcctgtctcttacagtgttcagtttccatttggacaaagcaaacgtggcaatattttttaatgttccaatattatagtgacataagtaatattgataatggctgtagaactgaatgaataatacacagcataagaacgtttcagaacacagtgatatgtattcctaacataacttctgttatttcatatcatcctctcccactgttttgtgtttcaggtacagagccttcatttttattttgacatttctgctgtatgcaagttttcacttatctcgaaagcctatcagcatagttaaggtaagaatcatggaaagcactgcctgtcgtctctgtgaggagttcgtcacttgaaaagcttgtggggcagaggatggggatggtagcaggtacatggggaaacagattatgtagaaacaagttattctgctgctttggcttttcggtttccctttgctaaaattaaagtcttttaaatgttttttggatttatactttcagaggtagtagacttttagttttattagttgacatttccagaatttgaaagcttagctaaatatttattttatcttgtgtgactgttccttccaaatgtatccagtcttaagtggttccccaaattccagctcttcgtgcgatccaaccctaggtctggctgcggaggtggctctccattgttcttggaacgctgcatttttgtctgagtgatgggtgggcaggaagttgttaagcaggtgttctactagactttgagaaaagaagattaaagcagacaagcctacataatcaccagttataacctggagaaaagcaggaataattttcttaccctcattgggattacgtcacccggcctgtagaccatcaggggcctgagaggcattagagtctctatcgtagaagaacgaggaaatcatccactgccagagacagtgcattcacagcccagtggcccctcgctcactctccgggagttggcagggacccagctccaggactgcaattctgtgacctttggagctgtgcttcctccactcctgccggtggctgagccctgggtggctgccctctgcagccctggtcggcagaggcaatgcagaggctggctgttttgtgacggtcctaggttccccactctccagcagctttcaggggatgttaaacattcatttacccaaaagattctaaaattcccccttggcccctgataagcaagaaacttccatgcctctcaagttgttgactgtggaaaacgtttgcagacctttgaaaatgtggtttttaagagagaagaatatgaaaagaggtggtgggccttaaacactcatccgcttgacaagaaactctcaaatcagtaccagtaaccagtcattataaatctgaatactactacttcttgtctttctggttagagaaatatacaaacagctcaagaaaatggtaaattataaagatggaagtgactattgaagagacttggtgagcgtgttggagttgaaggatctggtgtagttggggagcttgtgtggggtttcaggattgacctagaaaggttgggtgtggattgtaggggaagaaaaacagctttacaggtgggagaactgccttgagtgctacgtgcagggatgggcatctccatgaaggcaccacctgttgggctggggggctgttggggcagatgtagcgtgtaaggtgggctggcctttgggggaatctttgtcaggccacagctgttggggtccacctgatgactatgagggcccctgtgagccaggagcaagtgggagccctgtcccggtccctctcccggctttcctggtggtccatctcaaagcccccgcccctgactctcgtgtgtagtggtgtccaggccactcaagacttagggcttctgaggaggcggcgtcagggtcagctcttagttcagtgtcataagtaacaatataaataactgccgcttacagagccctggggtatgacaaactgccacatacattacccctgtgatcctcacagcaaccctgcgagtgcccctgtgaggaaattgaggctcgggtcttcgttccccaggcagggctgccacacactcgagaattccctgtgggtcaggctgcctccagggcccctactcatcctctctgtgcctcagggtttgtccgggtttaattacctgagtacagtcccagcatcaccctcagagcctcctaaacgcacagatttcctgacctagcagctgcgatgtgcctgggcatggattggcttgacgctgaatcctgtgggtttctttacctttcaagatagatcagaacatcacaccacatcaaaactaaactttatagtgccttctgaagcgcccgtgtgcttgagctcatgatataaatggcatcaacgaaactgaaagtagtagtgattctgttgacccacaaaacagttgagtgattatttatagcctgcatttcccagaatattgtaagcaaaaccaaagcaaaatgtatttgcttacttgaaattgaaccagaggctgtgaattagaaagtgagtcttattctgttatgtcatttatagaatgacacggcacaccaggtcacatttaagttagttaaatggaatgtttagacttacctttgatcactgctgattaattgtatttttctcgatgatgatgataaaaccagggctgggaggatagtggtgttataagtgcaaccctgtcccttctatctgctgctccagctgtggcctagcctcaggactcaaggcaagcgtctgcccaagctggtagacaggtgagtctgactcccagcagagatcttagtgcgagctcttttcacctggactgggccagaaaagaaacctgaaagcagaggcttcccggagaagcttaaactgcaggggtccctggagccagggggatggcagcattgatttgaatgtgagtgtgcccacccctctctggacacacaggacttaaaaggagaaaactggctaggcgcagtggctcacgcctgtaatcccagcactttgggaggccgaggtgggcggatcacctgaggtcaggagttcaagaccaaactggccaacatagtgaaaccctatctatactaaaaatacaaaaaaaattaaccaggcatggtgacaggcgcctgtaatcccagctactggggaggctgaggcaggagaatagcttgaatccgggaggcgaagtttgcagtgagccgagagcgcaccattgccctccagcctgggcgacaaagtgaaactccatctaaaaaaaaatgaaataaaataatcctcagtggcagacagaaaacaaagtctgaaaagctggaagtatgtactatgggtgggaaacttgttatttggaaagttccaattctcccagtgttaatatttaaataaaatgcaactccagtgaaaatcttagcagggttttttttaattgaataaaataatcttaaagtttgtatgaaagaatgtccaggaattatcaagaaaagtgtaaagataacattttatgatatgaaaatatgcaaaagattaacatattttaataccataatcaaattatgatattacatgagaatagacaaaaaagtcagtagaatagattagaaaatatggaatatttgacagagcttatttaataaatttaataaatggtgtcggcacaactggttattcgtcaggaagaaataaatgttgaatccctattttataaaaacaaatggcccgggcactgtggctcacacctgtaatcccagcactttgggaggccgaggcaggtggattacctgaggtcagcagttcgagaccagcctgaccatctctactaaatgtacaaaagtgagctgggcatggtggcgggcacctgtaatcccagctacttgggagactgacgcatgagaatcgcttgaacctgggaggcgaatgttgcagtgagccgagaccacaccaccgcactccagcctgggtgacatgagtgagactccatctcaaaaaagtaaaataaaataaatggattaaagacatgaatgtaaaatacaaaaagtacaaatccaagaagaaaattatgtttatcgtaggagtgagtgtgaagttaggaaacccaaagaaacaacgggcaagggggatgaacaagcagtttacagacacggaattcagatcgccaggaaatatgtgaatggtgttcgagtctgccggtattccatatgcaaattaaggcaacactgtgctcagtggctggcacagcattgcccagggcagtaagcgctattcactggtcgtgaggggagaggagttttcatgcgttcttgatgggatgtcaagcgttagcgccttttggtgacacccagtgaaataaaaaacactacagccttcagacatacttctgggaatttcaccctaaaaataaaagcaccttacttaggaatatcttcataagcatctttatggcagctttgtagtgaccaaaaaaagcaaaaaggaaaaaaaaacaatgctggatatcaagggaacctaataagtaggtaaaagtttgaataaattatcacaagtccgtattatgaaatgtgcaggtccctaaaagaattcatcacaggcaaaccagttgactcagaaacatttccaggaggtactttgagtaagaagttaacatgtgcataaggatgtatagaatgattccatttttgagaagtaaacaatgaccaagaagctcctccatctatttctgtatccttcatgagtggagcatttgcgtgtctgtccctgagtgtgtataatgcatttcacgtggcacctgtgactcatcgcaggaggctggccgtgggcaggtgctgttgtctgtgggggagagcctggctggtcgctcctacttttggtaccaaaactgtaattgctcttccaggacttagataatgctttggagaattcttgtagccttataaaaggaatgtgaaggactggttagaatcagtgcacccacacagcctaatgagccacgtaaagttgactagacagatcgtcaaatgcagatgatacacacacacacacacacacacacacacacacacacacacacacacacacacacacacaccccctctgtgttggctgaaggtggagtgaaactggcctaaccccactgtcctccagggggattcagtgaggcctgaatcccctgctcctgtcctgtcctctcactgttgcctttcagtggctcctgcaccctccagactgcctgataatctcctctattggaggccacgtacctgctgcagagaatgtgtcgcgtggctgtagtcttaggcaacttaggtggggctgagaacccagggccacttctgtctgcgaagtggctcaaattcagcatggaaagaacggagccttcatggaatgcaggcgaatacagtgaatgtttgtgcctaaatgactgcgtggggctctgcaggtgtaggatgagggaggagtccagtcttttctagtgtcatgaaattcccaccgcagctgcctgctgctccccggacgggatttcctctcgctgccagtgggaggggtggggagggctggatgtggcgagggagtctgtagacagaagacattgccagctcccagccccaccgccttccccgcacactcgtcgcgctgtgactcccggccccgccgccttccccgcacactcgtcgcgctgtgactcctggcggttttctgtgttcttccagaagattggcacctttcttctcccacccccaccctccacccgcgatggcatctgctgtttatttttgttgctgttctgtgtgttgcatggacgctttagcagccgtgacgcccgcgtcttcacagggcccactcagcctcccgcctcacataagtgtggagttcagttgctgcagaggcttttgcctgatcagtttttaatatctacctgatgtcacaggttgattttgtatgtaacttgttgaaaggcacttgtgtaaaaaggtgtaaagaaagctgcttttatgaaagcagacgtttcccaaaggacttgaccccctccccaagtatttccgcagggatggtgtggctatgcagaggtgagggtgcttccctgaagtgctttggtgagaatttgctcacctggcgaggggtttgcttaccagttcatcttaacctaattaagtttgcattgtctctggaacgccacgtttgggggataaaactcatagaaatactgaaatatagcaatgttgttgaaaacctgtggttatgtaaatatcctcagaactctttgtgctggagtaatatgaaatctcgatggctttggcagcagccttccaacaggtctgcggggtgcgggtgaaggtgacctttccaacatcaaggagaagggccagagaggcgcccggactcacagtggccctttcctggacccttcccaggggcggagggccagagaggcacactccgattatggtccatctttatagtaatgctgggacacaggcattgtcatgccaactccataactgatggccagggagtgtaagtgatgtcaccaaggccagaagccacagagaggcaccaagatcccagcttaggcctgtctgctgccgaagcctatatccctaaccaggatgtgagacccccactcattacataacaaaactaggaaaacttttctgcttatttatgaaaaaaagggaacatttctaatcggatatgttttccacaggtggttcctccccagaaatattaaatcacaaaggatataaaattctgttttaagcggcggcctgcagaatctctttttcctttcttctgcaccaggttaatgttagaaacttcagcttctccctgcacatgattctccctcagccggggaatgtcctgtattcctgccctagctgtggctttcttcagtcagaggtgaattgtagtggcgatgcttaggccctttgggcgtggccagattgacttccatgggaggcagcagggaaaggtgggcagaaacacctggcttctgaaggtgccaaggagaagtgttcaacaaggcggcgggtgaacagagaaaggccacagataccagcttgatacagagaggaagggctgcaggcacccgccctgggtctcacgatcacactcccagcccctcacgtccaccttgggtggagaacttaaaacacaagcaggagcagccagggggacccaagcagttggggagcaaatgaaagcactctcttcctgagatgccaggaggtcagcatggcgcctccagggaggaccagctctgccaagggagctgctgggcagatgatgactttgcattgtaaagtagagcccttggctagtttttggggacagtgtttaattatagcagaacagcccagtgatgacggcagagtcacgtgaccgtggagcagctgcatcacgtgtgacatgccgggactcagtgacgtggcccacgtgctgccagctgtaaatcagggtgtctagctccgattcaaaagccctggccttttgaaagtggccagccttgttggccactccctcctgaagagggggggcaggacttccggctgctgcctgcctgggcactggggtggctccctgcccagcgttctgtgccctgacctggagccagctttgtgcactgccctccagacccctggcctctctcaggttccagctcacgaggacacccctctggtatcacgggcactgaatgggcactcgatccccctaagggacacccctctgaccacaaggacttcacttgccgccatcactcacgcttgatggggcaactcctttgaatcttgaatagtgcagaatgatcactacagagacccctgagaagagaagcatgggagcgacagaggccaccagggagggacacacagtcacagagcacattctgtcttcctcagtttcccccgcaacaagacgagcccctgccacatgtggcgctgtcctggaagtgttgttcctcttcccaaggaatgccctgaggaagagcccacttaggcccctctgcctcccaacgagaagcacccactcaggcccctctgcctcccaacaagaagcacccactcaggcccctctgcctcccgacacatgagctttcctctctgcccagggtttgtttcacaagggccgtgtcatcctaagctctgtgcaaaaagcctggtgttcagcgtcacgggtcccagtgacttctgtaactgggcagcagccttgtctgcagagggggagaccgaggcaggggcagcaagtaacatgctcacacagccagtcaccaaactccagggcgatggctttcccctcctcccacctcccagacaagtgtctccaaccctggccctgcttgctggttctgtggacagtttggtgggtgggtggtcccctgccccagggatatttttaaattgaggtatgatttacacttactaagtatacaaatcttcagtgtacagtttggcagatctgtacatgcccataggggtagtcatcctctaggttaagggatggaccctttctggctcccagacagctccccatcccctgtcccacattgtccccctttaggtaaccgtgactctcacctctagccgcatggattcgttgcccatgcttggacttcctatgagtggaatgctgcagtctgtactctttcatgtctgcctccttctgcttcatgttatgtttgtgaggttcatcctcattgttgcctggacctgtaacttgttctttttcacgggtgtgtagcattcagttgtgtgaatctaggaaaatgtaccccttcttccttgtggacaggtggtcaaggatgacaggcagtcggctttcagcttggagctcttagaactaaaactgctcccgaggctcgtcttctggtggcatatgaagatggcttatgttcgtcacgtgctcaggagtggggttgctggagagtcctgctgaaacgtcaccagcaggcattcttgtgggtcctgcagacacaccgccagcagcgccttgtgtccctcttagaatgcagggtgcaggtgccctgggcaggctgctgggagaggaggggtgactgttcctctctgtgccccatgctgagcctcactgagggcacttcctctccctgcttctgccctcccatcacgtcccagggtgagctccacaagtactgcactgcttgggatgaagctgacgtcaggttcagcagccagaacaggaagtctgggtccgctgccccccaccagctccctgacaatgagaccgactgtggctgggcaccgtttggtaagtcgattatcggtccgtccaggagccgaagcggctgtccttccagccttgctattaatcactttagcagcagtaatgctgttcccagatgtaactgcatttccatgacagccctctcctaccaaaaagcacatgacttcaccgccacggtgtccacagtgcctgtgcgcagagctgttcctcctgaaagaaggttctctttatggggaaatgtgctgaagatcatttgcattttgtattttggacttgcagggcatagttctgtgggtgagaagaagagagagacacgaggcgctggtgtgggtgctggcctaggcaggtgtgctgcagaaaagccagtggacacgtaaaagaaaaggcatcaatcaaatgtgcagccaccatgcacaatggggattttatctcatctgaatgacgcctgtattatatttagtgattatttgaaactgcggtgacttcattttcctttgcaagaaactgaacagaaaatgcaccgccttgttttctatgtggaaaaccacgcgtttcactaagtacaccccgatttcgggaacagatgctttgtgttttatagccgtgctctagaacataaactaaacaatactgagcttgtcctgctggttttcaaattcatatagataagaacaactatcagcagctgcttggggccctggactactccttcctgtgcgcctatgccgtggggatgtacctcaggtaggtctccttcagttttccagacccttcctggttacctggcccctccgtgcagagaagacatccgctatgctgaagtgcacaggcgcgcgggattgaggcccccgcttgccactggcttccctgctgttcccttcccaaagacgaggccaagcttaggagagagcaagtgcgtgtgctgtgcccacaacacaggacctcgaggcagaggatttccgtgtcccgggcactgtgccaattgacacaggctgccctcagctttcctggccctgaagtttaggacctaccatgaatcctgccaatcctgggacgtggtcattcaggaacagaggactagtttcctgttcagcagagcccaacctctcctgtggttcagaggttgccatctgtttatatgccccaaataacgaatttcacctgatgatcgaaacagttgacacaggatgtgctgaacagctctacctggatgcccagcttggccccagaactctgagcacagcagaggcagccatgcatggcgggtggggaactccagagagagaccggctcggatctgagtcccagctctgagtacagcagaggcagctctgcgtggtgggcagggaactccagagagacaccagctgggatctgaaccccagctctaccacctgctaggatgtggccttgagcaagttactatacctctttgggcctcagtttcccctttgcaacatggaggaaataatagttcttatgtcataggattggggcaaagattgagttaatgtatgtagaagctcacaacggtgcctggcctgtgctgccagcccagcccattcttgatcccactttgaactgaccaaggcaggtggtgaatattatatgggtcataggacgtgtgattggctgattaaaaactgctattgtgtcagtccagccaggtttttttttaaaggcagtatagggatgttctagcccattttctgttgctattagcacaatatctgagcttgagtaatttataatgaaaaaaggtgtatttagcttttatctaactgggaagttcaagattgggcagctgcatctggcaagagcctcgtgccacattgtaatgtggtggagggcgtcacctagcagaggcccctgtgagatgggttagcagtgagcagggcatacaaaacagacacagcacaggggtgacgttgctttatagcaaccagctctcacctctcacaatagctcatcagtcctgagagcgcggccactcactcctgcggattcattccttcgtcaaggcggatccctcatgacccaaatgcccttcaaagctccctgtacctctcaacacagttatactggggaccaagcctcaacacaagttttgatggagaccaaccatagtcacaccacagccagagactgaggcatgtggtcccaagaggcttttgttcagagacagaggtctttaccgcctggagaaacccagggatccccataaatgtttagctgcttccctgagacctgcccagagtgtaggatcatcaagacctgggcccccctaccccgctcagagccctggtgggtggttggtgcccaggcaggcagtgtctgctgttggaggagagtgcatagctctccctttattgaacgtgtgtatttgcctcctgctgcagaacttgtctaagtgaacaaatgaataataaagatttggaatcccagagtgtgtggtgtgcagcagaccaggagcctagctggagagtgtggtgtgtacctggggcttccttagcgcttgggtctcagccaggctgccagaccttctccactttgaggtcaaatgtttatattccccacactgcagtcttactgaacacaaataatctgtggtataaaaagacccaaagtgggaatgtgtttttctcagttactggaaaactgcatttaaatctggttctcagctgggggcagttttgtctcctaggggacatttagtaatgtctagagacatttgtgggtgtcacagccagggaagggatgttgctggcatctagtggctagaaaccagggtgctgctaaacatcctacaacacacaggacagcccctaacaccacagaattaccggagccaaagtatcaatagtgctggggttcagaaagcctgctttaagtaaataaactggtttcttgttgcttatttacggtaaagataattcttatgcaacttgtcagtaaggttattaaaacaaaatttggtctaatgtgacatctacacagtaaactcatgactgaaaacaagggcacatgctgctgcattgaaggggcctttttgtgtgacagtccctacctgaggtctcagtgatgggtgctgttttgttcgctatgtcagatgaaatcagatctgatagggtacagccattcagcccaggtactgcctggtgggttcaagcaggtgcagcgtggacttgaatccctgtatgagtcccatgtaatgtgaaatggtgtttgttcaattagaccttttctttaaaatttttcagtagagatcaaagtaggcccaaatcatatagcaagattagagaatacttctaagcctagccagcagcacccagctctcaggagcccatctggttgtgccagctgtgctgtgacctgggcaggtcagccagcctctcagggacctatctcctggtctctgaagtgggcaggttgaagtcagtaactctctagctctacaatgctcttgagtctgtgtgtggtgaggttttagctgaaattttcacctggatgttgtctataattttaagttactttcttctgctttagtgtttaaaaggtcatttgcatgatccaaggtagatcttttttacttggtgaattcggaaggaaaatctctctggcgtaggtttttgagatgaaagctgagaacattggagctgactcccggagtggggttcatggcaggcaggtgtcactgtgtgttaggtttcctgtttatctgactcctagaatgaccctacagaagaaagtgagacccatagagtctctaatgcttgtgaagggctcacgtccatccgtgatactctacagcttttctgtttacttaataagtcacaatgttaagttggtccatagtgacatttcccataaaacagtaagggatgttttggatggcattaggtattgtgctgtgatggcggctaaagactgttaagtctgttccctgctgtgaagctggagactttttaccacccccctcgaggctgttttagtgaggcgctaagcatcccttatgccaccaggtccccagacagctctagaagataagacaccaaagagggtagctgtttagtgaatcgcattgctgttcagaaggatcagagagatgccaccccagcatttcagaccttaccatagagcaaatcttctgcctttaaatcaggtcaaagtggtgtggcaggaggcggtagtggcaaagcagctgaaagccacttccccactgagcccagccagccaggtgtattaacacaggtgacttaattacagctcgtggggccgaatgacttgctcagggtcataagtgatctcatgacatttggtgtagtttgacaactggaattttaagacactatatacatttactggatatggtttatgtgaaagcaggattaactagcaagacgagttcctgtttcctttcattggcagctatcatagataagtcctagtgtttgaattttattatttgacagataggacttctactagaaataaaatcttctaagatgttgccagtctctggtttctggtgagtaagcgctccatagggaaataagtgtatgaaatcttcctggaaattgtaaggcttgagagttccccaagctcagagaacagcatgaaagcatccggcaagaaacagccacgaggttgctaacattcgggcgtgtttgttattcctatttgtctttccttctctccacctcagtggcatcattggggagcgcctgccgattaggtattacctaactttcgggatgctcgccagcggagccttcaccgccctgttcggcttagggtatttctacaacatccacagtttcggattctacgtggtaactcaggtaagggtttggatccgtggctcaccatgtacggggtttccttggtgaatagggtggagtgtttatgtcacgtcacctctgtcaaggtgttgggaaggggcagaagtgcgtcctgtcggaagtcagggtcagctgacgtaacaaagtccttccctttctcttctgcttagaaattccagcaaccaggaggttttccttaatttcaggagttgcctcgtaaaaaatgctgtctgtcagtgccccggcagggaaactgacatgcagagcccttgggagtcactctgtcttcatgtggataagtttgaaatgttttatcttgcgaaagatttgaccacttaggggttggagggtgtgtcctccagctgaagccccagctgcagtcaccctaacagcggtggcagggagttcccaccaggggagcgccccaaaccatcccaagatggggctggttgggattccaacgaacaaagcactaaatgctgggtgatcaatttaaagcatgtattaggggaacttacatactgagggctgcagtgtatggtcgcaacacacagcgggacagggcgttccacctaggtctgtccacagtgaggggttggcatatggagtttatttgagggtttaaggaatttggctcagggccagggttagtttctttccatgttttgggtcaacaactgaaacacctttatcagtgcctaggagtgttcagggaccaacttgggtccaagcctacaaaggaaaacctgcagctggttgggtcacagtgagaggaaaaagggggagacctgaggagtctacagagggatgcaagggcggaaggaagggccgactttggagttgggcagcaggagggggtgtgaggcagtcagtggagagaacaggagagatcatgaaggtgctagaaggggagaaggcctgaggacagcgcgcgctggctttgcccttggagctggagcccttccggaatctcctggcttctgcccttcccagcagtcctgtggatcaatattcagcagccgagggaagctgctgaaataatgatgctcatctcgggctttgtgatgcttctggggctccccagataggtcaggggaatgctataaaaccatcaagcagattgtatttaattttgcttttcaagattttgccataacacttgaaaaagtttggctattttaattacaaaagcaattcacacttgtgtagtaatatagaaaattagaagggaggagaaaacaattttccagagtcccagcatgtttctggagtgaaggcccagcccggtcagcccagaggcagcaacagttagaccagcggctcccaggcgtcttctagagcagcagtttccaacctttttggcaccagggaccagttttgtggaagacagtctttccactggggaccagggttggggagaggaggatggtttggggatgaaactgttccccctcaggtcatcaggcattcgattctcataaggagcgcacaacctggatccctcacatgtgcagttcacagtagggttcgcgctcctatgagaatctaacgccccgctgatctgacaggaggtggagctcaggcggcaatgcttgctctcccactactcacctcctgctgtgtggcccggttcctaataggccacggatcaggactagtctgtgcctggggttggggaccctgctctagagagctggcttactgcagtgaggtggtcagagctgccaggctggcccagggttggggaccctgctctagagagctggcttactgcagtgaggtagtcggagctgccaggctggccctggtttcgtgcagtcttgtagagccacccccgagtctcaagacgctagagcgtcctcagcaatacattccccaagtcccttcatgaaactcaagtcagggattcttcaaaagtgcagagatactttgtccaggcgcgaagtcaagttcgtgttcattccagagaatgattaacaacagtaccttctccatggcatggtaagggaaacatgcaattcacaagccatgtttatcatacaattctataaacagttcataaagagaagaaaggttttctctctttaaaaagtttgtatttgtttattttttgagatggggtcttactgtgttgcccaggctggagtgcagtgatgcaatcacagctcactacagccttgacctcccaggctcaagcaatcctcccatctcagcttcttgagtagcttggaccacaggtgtgcaccaccacacctggctaatttttaattttttgtagacaagggggtctctctatattgcccaggctggtctcaaattcctgaactcaagagaccctcctgcattggtctcccaaagtgctagaattacaggcatgagccgctgcacctagcctctttctatgaagtttttggattcaaaagagaccgggaagcttggccccacactgttatgaggtgtgatctgctggtggtggggttctggctgggttttttttcctcgcttttctctgcttattctaaaatttccacaataggcatgcattgcttttattttgaaaaatatatagatacctgtatacatggttttaaaatatatatgtagtttaaactgtatataaatataaaattgacagtccatctctggctgtcgtgccccctgctttgtgtaagtggagcaagctctgtgcacctccctgcagcgctgtcccgggcctgcttcccacaggtcagtctctcctttggcctctcctgcaggtcatcaacgggctggtgcagaccaccggctggcccagcgtcgtcacctgcctcggcaactggtttggaaaaggaaggtgagaaaaagcagccctgtttccaatagcagatgaaaactagaccattttacttttagtttttctgtagactgattacagcaaaaacactttagtatcctctttaaaataagatggctgaaacctctggggcttgaattgctgaaattcagatggcctgtgtcccacgagacaggggagctccgccctcccactgtgggcctggtgaagtccgtgtcactcggcggctcctctgacagctgcatctggcctcccaggtgttgtgggagatgcagagtccaggaccctgccccaggccttttgaagccaaagctacatgttaacatgggagtttgggaagtcccgacctgggtcacccagcgcacagcaccaaagtagcagagctgggacccagcctggcgagtccagatttatttgtaaatggcttttattttatacagataaaatttatttatttgtaaaattcagctcagccaggccaaaggcttatttatggtggacgatcgcaaacaagatgcggaagctaaaacgggaacaccagcgtcatcaggtcttaagtcttagatactgtgcctcattcacctggtgtgtgcatccatgagttttgttcaaatgacagttcatcaagtgactgtatgtattaattgattgtagaggcacaaattttaatttcaggccttccaagactttcagggaaaggcctctttcttcttcttgagtacagaatgcgctcagagcaagaggtagaatgggtgatggcacagcctgaggccacataaacacatcagctctcgtgagcatcgcgagtcctgcatggcacagaagcagggtctgcatggccccccgttgattctgcgccgactccctactttgcaggcactgctgcgccctgcactgctggactcgtttcagcttctcagctccatcttctgtcttctgttttgttgtgctgcaggagaggtttgattatgggggtctggaactcccacacctccgtgggcaacatcttggggtcattgatcgctggctactgggtgtccacatgctggggcctgtccttcgtcgtgcctggagccatcgtggcagccatggggatagtgtgctttctcttcctcattgaacgtaagtgcacgtggccttggagaccacccaccaagggaggcctcggatttccctgcctgggtgggccttgggggcgagtgtgagagctgcgtggcctagcgccctgtttgcccgtggctgcctcagcgctcttcttaccagggagacttccccggggagccggttctctcctggttttgctggatttcctactctcccctgattctggagtgacccatgtccccattccttcctcccgtcctcctgtcctcccttgccccggcatcaggagttcatgcatgggagtcttccatcttcccacaggctgttccttctcatgcccatcttgccaccacagcctgaattggacccagtcagctctttgccttctgataagatatatcttggacagtgttataaaagactgacttaatatcttaactgggtaaaaagtatctcttggaaaatcaaatctcttattccatttcagattcaatagcaaactctttatttaattgaatttgaaattcatttctgaagtagagatccagcaggctctggtgctgagaagattcaggacagttacagcaagaatagagatgcccgggtggccctggcggtcacacgacaggggctcgaatcccgcaagccattctgataagctgtactcaactcttagttctttgactgagtttaaaccatatggcaggagacagctccctcatgctgcctgccaggtagggacactcagagccagctccctccagccacactgggcattgctgatcacttcagctctgcatgcaaaagttcatccatattccatttagtcgctcactttttttgtcttgcaaaagctaaccttttaatttttaaggtaaccatcatctggccacactgtgagtttggagactctcaccccatgcttctgtgttggtgaaaatggaaataaacattcagatgaggaatgtccagacacacccattggtgtgagcaaaaagtgggggccccgggctgcactccgctcccctttccccgcttctgcagaggctgagtaagccttcggccacaccccaaacagcctgagcaggggcctcctgggatgggtgggggtctggatccctcccagtgggccagcatgtggctttcagctctggctggtgtgtcactgcagttctgagaaaggccatttccaccacctgttttcttccgctctggttcctagaacctggagttctgtgcccctgcgctccaagtgtttgagacaccagccacccggagaacaatgtgcctctctttgttagcgcacaggggcccctgggtgtctcctgcctgagggtagagtccatggggtcttctgttctcttccttaactggaaaggggctggctctggggagaaaaggacatgtggaagggaaaggagcttgctcaatggccgggacctcagcacccgctccaggcattcacggccctatgttgatgtttgtctctgtaagcagagagagctcagctcttgtgaataagcctccctgatccaatttgggcagatagcaatgagccagatgccccctgtccctgggtcctctggccacaggcccactcacctacaggaaggctgcatgcttcatctctagccaaacaaaaccaaactaccagaacctcctgcccagggaatctttctgacactctttccccttgtgcctgggaggtgcactgtgtctgaatgatgagacccagctgtgacaacagtggctggatgctgagtctgagaacaggagctctttgcagatagggaggaaacatcaagtgccccttggtttgtttctgcccctccttgtcccgaatcactgatcctgggcaggtactaaaggcatcagatgtgccattcttgcggtcaacagaggatgtggctttctctgctgctccttcactcttgtctcctgcccagggtgagccccaaaggacagggcgtcccctgctcctttctcaggcctctctgagtctcctttctgaagctgttctcaaatgtgtcccagccaagggacgtgtgtgcccaagtccctgaaggtgaaagtccaggaagagccatatcaggggaagcccctggcttacccctgggggcatcacactgtgagtggataccgatggggtgagttggctgatgtcctttaaattggtgaccatacatcacaggtggaccattgggactgcccaacatgccgaccatgtgtccttggtcagtggcctcgccctatgggctgtgcccaggacaggagggcgacgcaccccacagccagccacggacctctgggtgcagacccacctggccctacggcatgttgataataaccttatcaacaaaacccagacaagaggtttgatgctggcctcgaggccagcaggagtgtgctcggcagctgcatgtccctctatgatgtcaccctgtgttgtatgggaatggacttggctgtggggagcctgcagccctgtagctcagtttgggttgcaaggcagtaaccagtttcatccaaggtgataaagagaccaaggtgcttggtagtcagagggggctgcagaggtggagcgagaagcagtagggctggtttcccgcagcacctagaggcctggggtctgactctgggttcccgcattgctcggggcaggttgctggtgtctgtaaaggacacgctgaagcctcacttctggttctgttccttttcaagtttcctcccttccttgcatttacacaaagatgtttgttccatatcaagatagatgttttatctccactcatttttatttctaatgaatttcataacatgaaatacctcattacagacattcttccagcctcgctcccctgatgtgcttttcctggttttgcttttcttctggggcttgtcctctgaatgagagtcgtgggcttgtccacacagcgtccgcatgctctgcttgtgattattggccacgctgggaagtattttccatatttaaagtagcgttcacgttcacagtgttggcactggctggcggtgatctgccataccccccttgcacacaagtgggctgccaggccgagtgactggggacaggccggggcgtgtgcgggagtcactggtgggacagccaagctgtgcccttgccctcacctggcatgctatggcgatggcttttttctgaaacgaatgccaatttagtaaaggtataagatggcatcttgtgttttattaaattttattgtgtatatttaaggtatgcaacatggtgttacagatacatagagatagtaaaaaggttactagtaaagcgaagcaagttaacatagccatcgcaactcacagctgcccgcttttgtttttgtggcaagagcagctcaaatccactcatttaatgtgaatcctgcatacagtccagtttcacacccggtgctcccgtgttgccctgtcctcgggttacgtagcttacttggcattgccatggtggtggacctgctcagcctcactcatgtttgctctttcagatccgaacgacgtcaggtgctcctccaccctggtgacggtaaggaccctgttttcttgtccttttctagaacagtgtgcggttctgaccacttccccagcctgctcctgcctgtgcggtgtcagacagaaacacacagggtagacagaagtcccaccctcaaaacattggcagttctaggaatagagaatattctgttttgggtttcgctgataataaccttatcagcaaaacccagacaagaggttcaatgctgtccagatgaaggacttcatgctaaggggaaccaaaggctgggccctggccaggcctcctcaggagtggagacctcctggtttccccaggggcctcagtgtgacggggaaaaacgcacgtgtcagctgcctgccatcacttaagttggtggctgcacgtctcaggtggccgagaggtctgcccagcacgccattccttctcttctgtacccctgcccagctcagccagcgtaggccctgcaggcaggattgctgaccacgttggctgccatgaatgagccctgccctagctgcctccacccgcagccagtcaccactggccactttcccacctggctaaggccagccctcccgcggtaccggtcccctccctctcatggcccagggcttgactcccgcagacacaccccccgccccaaataccattcctggcacactcatgtagtattggtggctgtcttggaagaaagtccctctggccctcatgcctgctcccagccgccccgctccccatgtccactggcatgacacccctcctgtctgcaggccaccgccacctcacgggaacagcccatcagatcccagcaacgtcacccggacacatagggtggtcagctctctggcctcaccctgctgggcccgtcgcccgcgtctgacccaatgcttccctccctctgggggtcagctctcttccctccctctgggaaaggctcccctacccgggctaacatgttagtcacgtctgtgccgagtgtcagaccccagatgtgggggtgcccccaggctgccctgcggcctcctctctccttgtctgcccgctcactgcaggagagcgcgctcgggcctttcagcggctccaggtgcgttgatgtcgagtcaccatgctgtccccagagtgacccacccctgagctccgcaatctgaggtctcaccaccactcaaccttcccacggagatgtctgagtgtccttcagacttaacacgactggaggagatctcttgattttacccctgcacaagccgatcccccagcatcccccatctcagtcaggaagctgctgtccaccctgtggacaggccagacccgaggagccagcccaacaccccctcccttcagccccgcaccccatccttggccatgttctgtcagttctgctctgttctgtgaggggatgtggaatggaaaccctctcacctcctccgcctctaccaccctggtccccgtcaccaccgtcagctctcctccgagccactgctcatcagcctcctagaacgatccactcttgctccccagaatctcttcttcacaccgcacttgcagagactgtattgatacagacgccagagcacatcagcccttgcacaacacagtccagtggctccatgtcgccccgtgtgaaatcctcaccagtccatctggttggtctctgtcaccctcacagaagggtgcgagcccctcgggcctggatcatcactgggtcccggcacctggggcagcacctggcctcgtgcgggaggggggccagagtcctttttctgtcttttcatacctcgggctcctgggtgtgattcatatggaaagaagggttctgatacttgatgacaaaaacaaagaaacaaaatgaagtttgaaaaccagtgccttcaggaaggtcaaacaccatatgatgttcttaaaactatggttgatattttaaaatgttttaaaaagccgtgttcctgccctgagcatgaatttcagtttccaagcttgtacagtcgtgccgtgaagtagcttaaagctgcccggaccagccgtcttgagactggggagaacttcgcacacaccttccgccctggaacaccttctgtcctctaagaagagcttttctcacccaggggcggccaggcctgaggataggaagcaggcgtgcagggggttttggggaggagcagctcttcctcacacacagcttttaggaatatgagagctcatctaggcgagaggcattgcttctgctcctcgtgtgtatgagtttggggctgaagcctgtgtttcattctccccgttcaaatcctctccgagcagttcactgagatctactggtgcccaggtgtccccgacgtgccctgaggcaggtggtccagagaaacagcttctcgtcctctctcctctccatgttggctggtcgcagagggagagatggctgatatctggggatattttatcagcttctgcaaacagccccaaagttctttttcctgcaggaatgttacctgctctgtgcaggacaccaacgagacccttgtcacgggccttcctgagggagctgagggcagtttggccaatgtcccatcagctgctgtccttctgtagtatcttccctttatcacaaatgggagcttttgggcaaagcaaaatgcatttgtaagagatttcagatgtgctgacttgttctgggaagttcccatgtggaagtgttatttttaggataaaattctaattttttccaatattttaaagttcttgttatggagactttaaacatataaaaaggtaaaaataacagcataacgaacccctgtgtacccattacccaagtttccaacagttggccaatctgactctatcaacgccccttctaatactatcccttcccacctcctgctgatgtattttgcaagcaaatagcaatcatcttaatattttgtctctgactacttcagtatgtttccaaaatataaggactcttttatgtgaaacaaaatgtactataccattatcacacttaaaaaccaatggcaaagaatagaaaaacagtagagaaaatcaatgaaaccaaaagttggttctttggaaagatcaacaaaattgatcatcctgcacctagactgaccaagaataaaggaggactcaaattaccaaaatcaggaccaggaaaggtggcatttctgccacatttactgaaataaaatggattatgagggaactatatgccaaccaattagaaaactttgaataaatggaaaaattcatagaaggacagaaactaccaaaactgactcaagagaggaggaaatctgaatagatctaaaacaagtaaagaaattaaattgttaatttaaaaacttcactcaaagaaaatcccaggaccagatggctttactggtaaattctgccaaacatggaaagaagagctaatactaattactcacaaactcttccaaaaaataaaagtggggggaaacttcctaattcattctatgaggtgttatcgtaataacaaaagactaaaacctcttaagaaaactgtacaacagtatcttttatgagtgtagatgcaaaactcaatagcagcaaccagaattcagccacctacaaaaggattatttaccatgatcaagtgggatttatcccaggaatacacagctggcttaacaggtaatgttaatgtaatacaccatttgaatggataaaggacaaaagctgcatgatcatctcagtagaagcaggcaaagcactggacaaaatccagcaccctttcatgtgaaaacactcaacaaactaggaatagaaagcaacttccttgacctgacaaagggcatctaataaaacccacacctcacagtgtgcttaatggtgaaagaccaggtgctttccgcctgagatcaggaacaagactaggaggcctgctcttgccgtttctatttaccattgtaatgcaggcaggccagttaggcaagaaaaggatataaacggcatgcagattagacaagaagtaagactacttctctttgcagatgacatgatcttttatacagaaaatcataaggagtcctcaaaaaaatggttagagtgaattaataagttagcaaggttgcagaaaacaagaccagtatacaaaaatcaattgtatttctatacactagcagtcaacaatccaaagatgaaattaaggccgtttcatttacaatagcatcaaaaaacattacgcgaagcagaagaaaccagtcacaaaaggtcacatattgtatgatttcattcatatgaaatgtccagaataggcaaacctagagatagaaagaagatgagtggttgtcagggactagggtgggaagaaaggggggatgactgctgacaggtatgaggtttctttttggaggtgatgaaaatgttctcaaattgtagtgatggttgcaaaactgaatttaaaaaccactgaattgtgaacattaaatgagtgaatggtacagtatgtgaattctgtctcaacaatgctattacaaatttttaaaatctataatcctttctattatcatacagctactcaatggtcagatctgctgattgtcttataaatgattttgcactgtgtttgagcaaggcctaggcaaggtccactccttctgattggttaatttaatgtgcctcttaaggctcttctaatttataggacctcaatggttttttttgttttgttttgttttgttttgttttgtttttttggtttggtgttattctcctttgaattgcttttgtcaaaataaaaaatggtcattttttctaccaagtttcccacatttgaggctttgctgaccttgtacctggggtgtgtttcacgtgttcctctatcccctgtatctcctgtaaactggaaaccttcatctgatccagatttgatttttctaattagtttttgtttcaaatgaatcacaattaatatgaaagagagtattcaattctttaccatttgccttgagtctgagggtgctaataagaatgtgtctctttatgcttctgccctgtgctattgaagagccatgggaacttgttcttttgatttgtatttgattcctaggttacttaggtttaggatatctattttgtgccctaatctaggacctcattgggtccaaaaccctgtatcagttgtgtcaaaattaatgtttttattaatatcttcagattagttggggttgtgttcagcagcaagcaatagaaaagcccacaggcagttactaaaacaagatgggaaggtatttctctcttctattcaagaaatctggagagagccagcccaggatgatgtggggtgtgcgtgttgagtgtcagggacacagactcctcttgtcttttcgttcttcccctgtgcatggcttcatgccaaaggtgatatattccaaccaattagaacagtgccaggcacagagttgatgcttaataattatttgttgaatgagtgaatgaatgattggtcagtggctgctggagctccagccattacatctgtattccagccagcaggaaggagggaaaggacattagggacaggccccttccctttcaggagacttcctagcatttcctaacatcatttctgcttagctgaccacatcaagctgaaaaggaattttaagataggctttgcctgagcacccacgttcctggctgaaaagcaggaagaagagggcccgggtgatgctggcagcctctgctcactgcgggggacggggggccgagtgctggggagcaggaacccatctctgcttctgcctggaatggtcggatgataaactggccagataatcacccctagcctggcaggctttgccctccctctgagcacaaaacaaatgtatttttaaaggtgttttgttacattttcaagtaataagatcaatagtttttcttaaccttcagaaaccttttcaggggaaatgcctcgaaatgtaaagggtgggatccaactgtccatctgaacggagtttaacccatgctctgtcttccccgtgtttcccgccttttggaggccccatagatctctacttgcagatctcacagttagcgtgcaagcctggtggtttttcttctcaaatgcatccagcactagtgccagaaatctaaatcatctgggcctctctaagccttagaaattgttttgttatcatttatactagagtgagtgaataacatctttctaagtacagactgattccttattttaaaggaagtttgtttggactatttcatcaacaaacaacaacattttaccactggagaatttcaacaattatttttataccattaattatcttcaaaaggggttctacatagagccctgtagaaataatgattaggaaatggtacctttattctagtgcccaagaaactgccttcatttcttcacttttcacttggtaacaggagataattttgaaatgattttgagttttggagtgcatcagtgcagtccttccacctccctgccctctagcagcaggtccacattctggggctgttgagcaagccacactctccttccctagagacggttttttttttttccttcagaagcattcggctgacctagggagggcaggtgttcctcacatgttaaagggaaagattggtctgtgccttttcatttcaaaaccattgaaacaatctcacggccattcagaaaagttaagttggcttaatgggtatttttacatttgattacacctctgtcttagctctttcttcaagagaggattttatgctcacattctattatctgagagtctggagtgttgagatcaaccattattctgtttaaatcagttgtcttatgtcctcttggtagcttttttgggacgatagtaagtatccttgctacagtaaagccaggtttaatttctagctgttgaatcagtatcgctctaatgaaacttttttttttaccagcactcaaaaggctatgagaatggtacaaacagattgagactccagaagcaaatcttgaagagcgaaaagaacaagcctctggtaagtcacacacaacttccacttcctagaatgtcggagctgcaggaaaactcctttgagccacgtcggctctctgtccctctgcctatgtgacatgtgtcacaaacatccaggtcttaaaaaaattctgtctcattgtatttcttcagtaaaatttgagtttgcccttattggctttctttggattttacacttaaccagttcattcattcagcagctccgcacctttcaatgtcccaggcactattccaggtgttgggggcggtgctggtgtagacggaacgcaggcagagacatcccccaagcggtgccaagcggcaggaagacaggctgagcaggctctattttcagctggccttgggaggcttccctaggcaggcagtgttgaaacagagctgtgagggactggagggagagtctgcaggtgcctgagcacagagggtgtcagggtgaggggcgcacggtgggctggccacgtgaggtgcacacagaaaactgacatcatgggaccaagaaaagggagaagcaggtaacagaaggaggcatctccacctcccctatgtcacagatgaggaattccggacacagaaatgctaagttaatctgccttgtcatccgcggtagcagggaggcctcagtgcaggtctggcccacccctagcacctgagcctcctgtgccctacccttcccatcattgatccttgtagaggctcctcacattgctgctgcttagctgaccacaccaagctgcagcgggcattttaaatttgagtttaatcattgaagttataagctgttctctttctagatcaggtttttgtttgtttggttggttggttgtttttttttttttttttttttgagacaagatcttactctgtcgcccagtctggagtgcagtggcatgatctcggctcactgcaacctccgcctcctgggttcaagtgattctcctgcctcagcctccctattagctgggattacaggcacccaccaccacacctggctgaattttgtatttttttagtagagatggggtttcaccatgttggccaggctagtcttgaactcctgacctcaggtgacccacccgccttagcctcccaaagtgctggaattacaggcttcagccaccgcacccggcctctaaataaggtttaaccttctacagcagacacagggcctctcctctgtcagaaagacccctccagcatgtgtaaggggctgctctccctatctttttaaattaaatagcttaaaggattaatgtactaaacatgcatctcacttttttattgactgcagaaatttatttgtagtggctgaaatattagaaaagggaagaatgatgtctcgtgcatctgggttcttggattttagggagacagtaggcagtgactaattcaaccaaaatgctttaaaatctgtacttacttctgaattcacatttaaacaaatcatgtcccagtgtccaaaaggctgtcacccctctctgatgatactgaagcctgccacttcttctgaatcaagaccacaggccctttcttctggtgtagtaactgacccatagaactagccttggcttctaagtatagtttctctctttccttttccggccctctaagaaaggctgtttacagacttgccatcaaggagccagttatgtaagtaaaggcactggcaggccttatttcaggctgagggtgacgaccacaaccgggcgcatgctgacctcgcttacgtggcatcccctttcggcgggcctgccattgctcttgggtcagggtaggcggggagagtccccatgaggttggctggacaccctggatgtcccctttcccagagtgaccgctgggctcagtggggtgtcacccagcccctgacctccactccttttcagacagagctgctacactatgtcacgtagcaggcagtttctcagtggcctcttgaagagacatgtaaagaaagctggggggcggggagcaaatgtgggaaagagaatgaggcgctgctgtcacttggccacgtggcgagcccgcaggtccccgcgggcgttttagaggattgtcttggggacggtcgcacttgccatccctgtagtcacttgtcacttttcctccttgacgtctctgaggatccttctgattggctgtggctcaagaactgttgggcccaccaaacgcggcgtgagcacggagtgggtatttggaggttgaatgtgactccaccgtgcactttgcacgccaagtggggactccacaaatctctcttgtgatggcctttcccaaagggaagctgcagacagcatcgggtagcggggtgagcttagcatttttagataaagcgatcgttattacgcagtccccccacatgcgtctgtgtgtatttttgttgtgtgtgggggcattttagtagagggaacccttttctctttgaaagtgtaagccctaagcgtggagtgcactggccacagaagcccccacacccaccgggggctccacagatcccatttggggctcttgggacacagactggaaactgcttgtttagaggcagaggtgcctcttggcctccagccttgtcttggtccacccagtggcttcttgtttgctatgtaaggaggaggcagcagcagccccctgtttgttttggaaaaccagccatggccccacactctttcccatctcctccaggagcaaacaactcaggtatggtggctacaagtcctgtttaagatgagtggctgtgagcacagggcccgttctcagcagaaacagagccttctgtctgtctcgggggctccttgctgcttagataaggagcagagggtctgtgtctgtggctttaaaccagcccagcaagtggaccctgaagcactttacaaatcctgcaagggccgtgggcggcctttgggcatctgggtcctacctgaggccaagtaggtcttctgtgttgacctgcggtcacttctctgcgggtcagagggtgcgcttctcctggctaagcggcctcgttccgcttgacttttctccagctggctgcatttcacccactgctgagcctgtttcctgcggaacggcctgtgaagtcctgtagccctcagcttgctatgagtggaactcgcctggggctgccccagggactgcttccgtggggctgggggaattcgaggcttctcaaagccccccgaggagattccagtgcttagccacagtagagcattactgatgtagttttctaaactggacgattagcagaattcatgagagaaaagtttattcagaaactcaagtcgccattctttgctttcacgtgccgtgatgggattatcatcgggagcatgttaggcatctgcactcagccttgtcatcttcattccagagcacctgactatgtggccacatgtgaatatcttcatcagagacccgctctccatgccagagtcctagctgtgaagccgggcttcctggggcacgtagacgctgggctgcccccaaggccacccactgggtgcccacactgggctgcactcggtgccacctgccacccggtttccaaatgtctgttttccactggaagagaattctaaatattctaaatatcaaggggcaggggaatgtggaatacattaccattttcttttttttttttaattaaactacatttttagtccaacttataacaggttatagtgagataagtaccacaaagcctgtttgattttgtgaaaggtctgagatacctagaagcatttctttgtaagaccttgaacctcatagctcactcatgaagaatatttttattttattttcattcttttttgagacagggtcttgcccgggctgaaggacagccgcacaatcacagctcactgcagcctccacctcctgggctcaggtgatcctcctgcctcagcctccagagcagctaggactacaagcgcataccaccacattccactatttttttttaggtcttactgtgtggcccaggctaagattatttttatgttatccttgctctgacttgaaatcccactctaggttggggaatcactcttctttgctttaatgaatgtacactttgtcctttaggaacgtctagacaatcagaattcataaatatcagaataggtgtattttaaaataatgttggtgtattttaaaataatgttatttctggtcatatatggccattgtgaactcctaaaaaatgcaggatcatgtaaagaatttcttattagcatttcgataaaaattacacataattccaccactcgctgacaaccattgttggcttagattttagcttctttctttctagaaatagatcctatagttgcctagttacatacgtagatatttaaacattctttgaggttataatgacatgcagttttgaatgatgtgttatttaatgtgtcataagcattttccgtcattaaaatctcccaaccttttttttacaagatgtcattcgtatggatgtatttgaattttctattttttctcaatgatgatgtgacatccattttactttataagtatctttttacttttcaaattattttttgccaatagattcctagaatttctggatcagaggatctgtgtacctagccgttcatgaaaatgcatgaatgctaatcattctaacacagtggccaggtgggaatgtcacccaggatgtctccaaggcagtggaagagagagccgccaggcaccctcgtcattaggaagcctggccccacttcacccagactgcccggctggtaacacctttcctttttgttcccaatggatttgcctccaggacccagagatgcagtgcctgctgctctcagatgggaagggctccatccacccgaaccacgtcgtcattctccccggggacggtgggagtggcacggccgccatcagcttcacaggggccttgaaaattccagtaagtaaacgtgcccaggaggagtttcagaaagggctgctgtgctggctgtgggaagtctggtcggttgatgattaagcttaaaaagacatctgtggttgtagaacccggggattcgaatccatagccaaagctagacgctgcacagtgctagcttcaggactgaatatggctgcagtgatatttgttcgcctcataccatgtttaaattttttttgaaattcgttttctccatttagaaattcaggttcatagaaaaatggggctccctgccttcactggaaaaacggaaagcctggcaccctgggcctgcccccatgtgacaggttggggaactgaggccctgactactgtgccacctggcccctgtggcccggcccctccccagtgcacttgccctcccacaggccttgagcgtgagcccatgggaggcgctggcactgagtgctgcgccgtggccttcgcgagcccggctggattctctttccctttaaagtgcctttaggctgggcgcagtggctcacgcctataatcccagcactttgggaggccgaggcaggcagatcacctgaggtcaggagttcaaaaccagcctggccaacatggcaaaaaccggtctttactaaaaatacaaaaattagctgggcgtggtggcaggcgcctgtagtcctagctactcaggaggctgaggcgggagaatcgcttgaacccgggaggcagaagttgcagtgagccaagattgtgccactgcactccagcctgggtgacagagcaagactctgtctcaaaaaaaaaaaaaaacccaaaaagtgccttcagtgccacagcccgtggtctgattgcccgtgtgtgtgagcagaggatgccaagagtgagggggaggatgcagggaccaagggaagaacgagtagcacaggcgggagaagccctcagaagctggaccgggctggtcctcggtggtgctgctggccttgcctccagactagaagggcgtgatcagcgggtgatcagtatcgggaacaaggtgacttggagcagatgagcgggaggggcactgtagggagatttcttgctgctttcagtttttattacattgatggactctctcagcagagaatctaaggagctgtgcacagggtgtggagacactgtgttcttccgatgggggcagagggctgagagcaggggcgtgggagggagaccagaccctgctgtgtgggctgggcaggctgtccagggtgggctgtccagggggcgctgtccagggtgggctgtttggcggggctgtccaggccgtgctctccagcactgacagccacagcaccagggagcagacacagctctcgcttgttgacacaacctagagaaaggcagagggccaggggcacaggcccgaggcccctcagcaggtcagggctggaagtataaacaatgcaacccagacctcaaaatcatatcacagaaattaaagactggggagaaccttggcttcagaacagaaagtattccagtgcccaggagaaactgggtctgcagaggtggaccctggagccagtgttcagccagaggagaacgtcccagcccagggtgggcaccagcttatggggaaagggctgtgcatgctggcctgtggaagctgctgggtttaagtaaaaagatttgtttttaattgtgtccttaatgctagtgaccttttctgctgtaccttcctctgtagctacccccaaatacttgtaccaaaagtagggtgcacactagcataaaaatacaggtttttatatagtggaggtatagacagtatgggcttcagaggtcccgctcaagcctccccctgccaccgccaggctgagtgttcaggcaagtgtggcacactctgagcctccatgtcctcatctgtcacacgggttccatccctggggtaataccatatgttgttctgaggatgaagtgaggtcatttaatgacaactaagcacaatgccaggcccatgaaaggcatacggtaaattacacgtacacatcctcatcaactgtgaagacatcaactcgtttcattttagaatgacttggcaaagtagagcgctgggttcccccggcccccattctgattgatttccagtgcacagacggctgggggattcagtgccacaatgttactggatttctcactctgaattttcagatggcatctggaatttttatctcacaagtgccacctctttctaaaagtagacataaaacaaacacaaacaggcattttacagaacccaccactcgatttcctcactcatacctacgtgtctcttttcactgttttccctgatacggactggtctgtagtactcacaaggcgggatgcggtagcctgtacgcctgtgtgctgacacaatggtcggaattgtttcatctgtgtgtttccaggtggcttgataatgtacaatgatttcagttccagggaagaagaaggagccattcgatactcagtccactgcacccggctatacgagaactcttttaatagctaagttttccaggcgatgtagtatgaaaatcaaacccgtccatgtttgcattgactcgactctgatgtaaagacactgggttttgatcctgaactccatttcgaaattcagaaacgccgtagataaacagggcttcctgtcttcacttgaaaagtagaaaatctggccacgctgggcctgcaccccatgtgacagtggccgaggagctgcagctggggccccacccttctcagaggccccgcccctccctggtgcccctgctcggggtgagcgctccactgttcccgcgtcctcactacaccacacagcggtgcagcaccctccccagtacgtgtctggaggtgctaaagccagaccagagacaggatgtctttatgggagcgaagtcatatttaactctgttgcatgtttacacacacctgctgactccacatttggaggagacgcctgactgctctctctttcagggcgtgatagagttctcactgtgtctgctgtttgccaagctggtcagctatactttcctcttctggctgcccctgtacatcacgaatgtgggtgagtatccacgctagaacacattaaattccgcacagtgactggggtccgaagtctcttctgtctgctggtttctagagtattgaaaacacaaggtcatgaagggtgatttgagaggtacacctttgaataaagtactatgatgaaacataggctaaaagaattcagatatgcacattgtattgccataatggtaaactttatggggcttcacggttgacacgttctatcccagctagggctaccagttcatgaggtacttcctgttctggggcagcctgcgtttaaacgtgggctacactgaactttggatcatagcagccagtgagcagaagcagagcctttggggacctgagaaaagaaatctctgatactctgacctggaaatggcttctgggagatagcgtctcatttttggcagggccgacagtttgctttatgtttcagaagccccgcagtggctgcagctatagattatcagaaaacgtgccagtgaaatagtaacatgccccccccatgtcatgtgtgaacacaggacagacaagaggagatgaacagtgcttaagggaaggagccgttgagtggggaaattggaaccctggctgagaggaagcggggatggtccaggagcacgtggagggctcttcgccccgggagccagagagagcgagaggaaggagaagacacacgctgggccgtcagggaggggcagaatccggcaatgtctcaaagaggaggcctttgagaatgggggaggctgaggagcacagaccacctattctggggatgcagatcccaccagaggaggatgctggcagcacgaggctggagactgaataccctgggagggaagttgaggaggcggtctggggactgtcccacagcctagcagggacagggcctgccccaagggccagtgactggggaggcagcaaggagcacccttggatcctgaggttccttccctgccttgtgacccccgcctcactttggccagtgagctgcacacagctgggccttctttctcccttcttcccctgtggttgcaaaaggggtgacgttctcaggacttgagtcttgaactgctgacatttccagtctgtttgaaaaaagcaaaattttctgtccatgccattgatgattcggaacggctgggtttgacccacagccccagatgccgtgcagtttcctctcccacacccggctggctcagtccaccttaaagcccagaacctgtacaaaacctcatggagggcaccctgagctggtgccgggaggcctctgtgtcctcatctgcagttctaaagccgtgtgacaggatgatcgagcatccaggcgccttccacacctccacttctgtcctgtgttaatctaactttatggcggaggggcccctgggggggtctctgaaccaaaggtgggataattagactgagcagaggaaagccacggtttttggttaagagtgttttcatcctttctgtgttacttgttttttaaatctgagttaactactaattgctcctcggtataaatcaagcttatgaagccagagtcccgtgcacgggtcctgttctgccatggtgtgtcgctgcgatgcgtgaaggagatcctcactgtttcacactccgttgtcatttcaatagatcaccttgatgccaaaaaggcgggggagctctccaccctgtttgacgtgggcggaatctttggtgagttcattaagacttgttctgctgcaacaataatttcgcaaggcgcatgatctctgagttgattcactgctcaggggaacagggttccccaaggtctcatatcccctgagtgggcccagcccaagagggtcaggccgtcacctgggggtggttttattgtctcccgtccctccccagggccctgactctgcacttgaacagcttccctcagaaatagcatgccagctggactcaggggctcatgcctgttatccagcactgtgggatgctgagttgggaggatcgcttgaggtcttcttgttatgaagaccaacccaggcaacataacaagacccctctctacaaaaaaaaaaaaaaaagcatagctgggtgtggtggctcgagcctgtggttccagccttgggaggctaggatgggagaatggcttgagtctgggaggttgaggctgcagtgagccatgatcatgccattgtgctccagcctgggtgacagagtgagaccccatctcaaaactaaaacaaaaaaagcagcagcatgtctcctgggcaggtgacagactggccaccttagtaccttgataggtaaaggggcttcgaggctggcctaaaacctgaacctgcagatgtctccaagactctcacatctgaccacaaccaatggaggcctgtggggaggtcagggctgtgagaaggctgcctgcccgtgatgcatggagagaggggcttgggaaaggaggaggccgttctccgagctcctgcagttctgcttcctccccgtgggctcatgccctgggacgtcagtgcctgaagcccgcctctccgttgcaggtgggatcctggcaggtgtgatctcagaccgactggagaaaagggcctccacctgcggcctgatgctgctgctcgcggcccccacggtcagccgtgctgccttccctgggccccaaagcctgcagacagtcccccactgtcctcctcgccagccagcatccttccatctggcccgtgctccactttcctgacaagcccgcttcattccctctcatgcctcctgtcccccgacccctcccttggcacctgcaggcctccaccaggctccctctgccacgtgcacagctgctgctggtttagcatgggccgcgcgcaagctgctcctctctttggggtgcccccttgccccagacaagctcctgcccatcctttgggatccgcaacacctccccaacctcttaggcatcgttgacacctcccgtcatgatgcatggtgcatagtgcttttcaggcatttcgtagctcctgaccttgggctgtgacacccccctctatgccccagttccctcatctggaaaatgggacgtcagtatcaccaccttgcagtgggttagaaacaatgcacatggttactgtttttatcatcgtaacattagaggtaacaggcttgtcagtggacgctgtagctctgcgcgtctgcccctccgctagccccagaacaaggcctggctttcagccatcttggggttctggacatggcccaacacagaacatgaaagaatgctgagtgaagaaatgcttgggtgggccccttgctgccactggggggtgggcagcctgaggacttggcagtcagactcgcaaatcaggagctcaagaaggcagccccttggctgggtaggagctcaggaaggctgcccttggctgggggtgtaaggtgggagcaccctgcagacttccccaggtcgcctggggtgcttggtccaaagccctcgtggtggggacaaggctcagtacctgagacgggagggggcgtggccgtcacgcttttttaggggtttccactcttgggatggctgcctgagaatcacccgccgggtttttgagaagtagatttccagcaatctcgcactgcttgcagccagccatggctttgaccttgtgtcttgatgtccacagctctacatcttctccaccgtcagcaagatggggcttgaggccaccatcggtgagtatggaggccttcctgcttttcttccacacacgtttttaaagttcacacagctggcaagatgaaatactaaaatcaacaggcgcattgagctggtttaactggagcacatggtgtggctaaaattgtccgtgtcctcctttgggcaagaccatctggagaggccggggtctcctctccccagtgcgaggcttgccattctgtgggtttcactgtgagctggaagtgtgcaagcctggtctggggcagtggccctgggcactcagtggagaagccagatgtgaccttgagggcagcccctcctggggccttggtggggctggcggggctgcagcagcctgcgacctgccacctgcaccctgcacccctggtggtgagagcagctcaggctggctcttgggccacgtcaggtagccaggaacctggcggtgtgacctgaacagggtccggccaggagccagggcaggtggccccccagccacctcctcccagctttgtcagctgcccctccaggagcggttgcgtaaccttggaggactattttgaacaccctgcaggcagcgctatcaaactatgcctccagcacttagaagtatgctttctgtcctaatgagccagcagtggggatgtgtggtccccttaaatgttatccagaaggcagcttgcccacaggagaggaagcggaatttcctgtgaccccccctcaggccagaagcttcctcacctgagtgtgagcctagaggagagtttaggaaatgacctggtccggagagagggtgggggtctgccctcagcgagcaccacagcagctgtgggtgaggagaggaaggcctttctgctgcagatgaagcaggggtcagcccaggcccagggtccggcctgtgatcgctccctcatggtggcagctgctgcccttcgagggtggatgagcctgagtcttagggagggtatgatttgctttagctcctcactagacaagtttagaggaagctgtttctgctgcatcccctccctgtgctccccaggcgcccacctcaggctgctcctatgcatgcggggctctctggagggcacatttccattctttgcccctctgcctcccacagccatgctgctgctcagcggagccctggtcagtgggccctacacactcatcaccaccgccgtctccgccgacctggtgagtagaaccgggagagacaccagccctgtgggcaccctgccatgtgccattcatgacaaaagtggcctccattactgttagtaaaactgcatttgcagaagcacgtttttggcagctcacctacacctgtggtctccagccttcccgcacctgccccgctgctcacccttctcctaaaatcatgggcaggttggtgcaaaactcaccgttcagcacaacaaaaggctcttgggcgccatcctcatgactcaggcgccttttcaatccaagggggcaggggagaggtcctgtcctggacgcctctgcagagagagaggggccacgaagaggcgctgggggattcggcccttctcatccaggtaccatgccctgccttggtcacctttgtattggacgtgtcctgaaactgcctgagtgtgcgtgagcatgcagacttgtgtctacatgggcatggaaaattctggaaggatccacatcagaccattagcaatggtcagccttcacggggtagaggcagaggagagactttcacttattttttagacttcaaaatacgtaggttctggatgattttcatattgtgtgttctttattttatatacatattacgtgcatatacaagcatttatttttttgaacgctggttcatttttatagttttaggcttctaggcactgtttcccctgatctttttcccctcctattgtcctcattttggcttttttcccattgtctatgcaacattttcaaaaccagagctcctggcggctgctcaccgaggacctgcgccagccttggtttctcagctctcccctcctcccttcttcccctggcgtttgctattgatcaggttgaattttaggtcctgcagagacatctgacaggggtcccaggaaggccctggctgtcgaggaatccagcagacacgtggatgtgtctgggaaggaaggccggcgcagctcagggcaggggcgcgcgttgcgcaccttcacgcctctcacgctggctgctctggggcctcagggaggagcaggactgtgcggaacaaacgttttttatttgaagagaatcctaagagttcttgtaactagaaccaagcatttctgatgacttttgactcttaaaaacccttgaagttttaactctccaaggcaagcttggggtggagtttaaataatgggaaacaccctcacgatgagttgttttgcagagcagtttgagtaaatggtcatacagaggcttaggtttacttctcatgctgtggcgataactgcacgtctgtttttcctctcttctaggggactcataaaagtctgaaaggcaacgcgcacgccctctccaccgtgacggccatcattgacgggacgggctctgtaggtgcgcagagagttttagctctgggaggtttggtgtcttaggggaaatcacattgtcacatgctcgtgaacaggtacccagggttccaactgcatctataacattgggtgggccggcttcttactatacgagcagatgagcaggggacatcggcacacagagatggtcacgcatgcctgggtggcttcagagagacgggcgtgtgactagctgtgcgtgtccaggttttcacccgaggcagtggttggcaaactacagcccgtgggctaactcaggtccactcattatttatcgccttcatctcaagaaaggcagaatcttatttaaattacagaaaaaccaattggtccaaaatcatacagggttctgagtgttaccagcatcgtcgaagctcttgaagagaattcagtggcatattctggaatttaaaaaggtggcagaataagcaagccatccccttagggagcaggcaggtggagctggcagagtgccagtctcctcgcccatgtgcagcctgacggcacggctgtggccttccctgagcccttgtatggggagcacgcacagtggctgcacctgccaggcgaaaatcaggagttgccacacctgccaggtgaagatcaggagggtccttcctacatgggggacgttatggggggctgcctggtgtggctgtcacagctaataaggaggacctggggtgccaacctgtgtgtcacttgctgcgtgggggtctccagtaaagccgagtgtttggtagatgaaggtggctcggtagacccaggtcagccagaacctggtgctggagccttcccactggctcgtgcagggagctgatgttgttcttggctgcccctggccttggtgccagcaggctggaaacatcacagcacgtttctgggtgcccactgctgtctcagtgatgcagaatgcaaagccctcccgccacatggcctccctgctgctcctccgaaggccaggctggcccccgtgcgggctctttgctctggtcacaccccgtgcctgggaaggtccccacaggtgacctcgtgccgcactccctcgtgccgcactccctcgtgccgcactccctcgtgccgcactccctcgtgccgcactccctcgtgccttgagtctttgcccagatatcatcctctcagcaagacttcctgggaccaccctgctgagaacgcgtgaacccttccgactcggcctccaggcccctctcccgggtctgttctctggagcgctctccccatccgcagtgggattcggtgcactcctctgttttgtctcctctgtctcctgccactggaacggaagctccaggaggacgggatttgcctgattctttgctgtatcccagtgaactgaatgagctgctcccagacagttagaatcgcagccggggcccaggcggctgactgcacagtgaggagccaggccggacaggccccaggcgcccccgcccagccctgggtggcgggaaccccagctccacgctgctgctgctgcgtttccttgttctgcgtttccttgttctggccttgttctgagaagcggcgggcagggtggccgttgccatgtgacacacggcctgattctgagaagcggcgggcagggtggccgttgccatgtcatgcgacacacggcctggttctgagaagtggtgggcagggtggctgttgccatgtgacacacggcctggttctgagaagcggcgggcagggtggccattgccatgtgacacatggcctggttctgagaagcggcaggcagggtggccgttgccatgtcatgtgacacacggcctggttctgagaagcggcaggcagggtggccgttgtcatgcgacacacggcctggttctgagaagtggtgggcagggtggctgttgctcagaaagccacactttggcttttgctgttcaccaaagtgagaccagaccagcctcgtctctgcccttcatgttggttccttcctttcactggatccagaggggctttgagtgtattgggtggcggcagtagtcacccctctgatcttctgtcttgggcatctcagtaggaagtcgggggactgcggggctgagctcagttctggttgacgttgtgactgcgtggccttctcttggccttgtgcctcagtggactgcagtctgcaattcggtctgactctgctgtgaaaccctgttcttaaagctaacttggcgctctactggcaaccccgattgctgttttaaaagcagaggatcagcataaaaaaagagaaggaaatcatgaactaggtgaaaaaacacatttttcttcatattctcaaaatgagagggaagcagaagtctgtggctaagggtggagaccctgcgtctgtgaacagaggccactgcccaccactgcccccaagcaggtggagggaggcacagttctgaatgcctttggcccctcacaaggaaggtggcacacacaccggaccccctctggccttctgttaacctgcaccaagtcctgactgtccgcggagctgccgcgcccaccttgatggctgctgcgttacaccagaggcaggaccaggacctgactcctccaggctccactgcccatcagtgcctgctgcctgctcagtgaatggtcaccatggaaacggcgctcaggcctacccacccccaccaccacgccttggtcattgttccttccatgagtgagtgctgcccagcaagacaaagtacaggctccagtgggaaggccaccatgtcagccaagtcccttcccgaaggaggtgcccgcatgcttattcagtgtcactgtccactccttggcagtgactcgggtggaggcgaaacatgactaatcgtaaatcacccctgccttctcccaagtgccacacggtttgttgacacggtgtgcgcctggggcgttcacagtgcttagaatcgcagaggttgccgtttctgtacatttcatgcagagcaattaaatagggcactgcatttttcttcaagttaatttttatttattaaagtaaaacataatgtaccttagaagctagacagtcctacaagcttattatgttgtacagcggcgttccgtccccctccccagccctctctttctagaggcagccaatttcagctgcctctctctgcttacctacgtatttccatgtttcttggttcatcatctgaacgtcatcagctgtgctcctcttacggaagaggggacctggctcccttccaccccgacattgcccacccctcctcctcctcagttataccagccatgcttctgcccttcactttccagccaagaaacaaactttaattatgcaccctcaatagatacatcttgttttttcccgggtaagtaaacatctcttttcctctttttcacatttccgacaaagttcttccttccctgcaccgtggtcgccatcctgccctgccccacccctttcacgccatcagcctcactccgcccactgcgcggcttggccccagagcacctgtcaccacggtgctgggagtccccctcctctcttgcctgcgacacagccctagcagtctagacccctgtttaccactcctgtggtggaaactggctcctagcagcttcctgagttaggggaggtgggttctgcaagcttacaagtgcgtgatggctggattctgctctcgcctgaggcaatgtggacgtggaaacaccttctcttcagaacccccgtcttccagcctccattgctgtcactgacacgttcacagacattctgaccccagcccttgctttctgaccttctcttttttctcttagatctccaggttcccttccttaccccgggagcctttcttcatccaccgtcctggggcacctggtggcaccttcagtctggaaacacctgcccttcactttaggggaattgggcccctgttcgtttgataagttttcctaccattttctgatttgttttttctttctggaaaatgtattagtcagatgtaggcttttctggattaatccttcaactttcctttctttctttcccttcctgcctgtctccctgttctttcttacactttctcagggagattcttgactgtattttccaactttgtatcgaccattttacttttcctgccatattttcaatgtttactgatgtttctctgccctttcagtgcatcctgttttatttcatgttagactgaatcatgtgaaattgataacaggttttcagccacacacacacaaaaaaaaaaaaaagagtgtgtcctgaggttcagcttagtcttctgttggctctctggggggaggttcaacttagtcttctgttggctctctgtgggtgctgtgagctctgggaatgttcttctcctccaggctccctcctgccagcttgcttgctttcacgttggggtgttccccagacacagggcagacctaggttgccccttcatcacttcccatggaagaaggggccctgcatagtggtttgaagtctctctgtggggacagtgtgctggctgctggtctccaggcagtgggaccctgcggaacctgcaggaggagactccttcagtgcccaggggagcctgggtccagctgccaacatccttgccatggcatggaagcttggtggaagctggtgtctttccccagatcccctgtcgcctgttaggtgagcatccctgtcctgcactgggcttagtgtccccacgggttaagctgcgctgtcctgcacgggggcatcaggaggagtctctttatcagtgaggatgagaaaagagacctgggatccgaggtgcggcagagggaatgtagctaacagtttgtgataaaagactcaacccatgcaccttttttctcttgctgacccccttccgttcccactgcgttcctccttccttgccttcccctcccctgtctcttgggctccgctgggcctcgctctgctccaggtgtccctgtgctgtctccctctgaggatgctcagtggagcagggaacactggaggctgtgttagctgtcagcccttctgtgtccatcttccaaaactacgtgcccttcggtgggaggatttatcatctttagaagtcagtgatggcgcagttcatgttgcttgggggtgtggagataacacatgagtagccgaccatgtttacctggaagttctgagaattaaaaaaaaaaacatacaattgctcctgggattataaaatagtaagtgcactttgtgaacacttgaaaaaaacaagtgcctagggcatgaaagaccctggttatcttacctctcagagttgaatatgtcagttcataggttggtggaaattcttcatgctttttcccatgcatctaccaaaacaggccatcctacatgtgtatcagaattcatttcagtccctcttggtaaaatgcaccagatgctacaaaacacattcttaaacagcagtccttgggcatttagggggatacgttatttgttttcatcatttaaaaacacatcttgacataatttcagactttgagaaagttgcagaaatagtacaaagaattcagacattttagtacatgtggttcatcatgcacccgtgtttttacacacacacatgcacacacacatatatgcacacacacatgcataatttttctgaaccacttaagagtaagatgcacacatgctgcccctttcctcgtaactattcagcatgtacttcctaaaaacaaggagttccatgacagaccacagtgcatgatcagaatcagaaagtgagcattgaaagaatattagtatctacaattcttattcaaattttacccagttacatttttatagcataagaatatctaagattgtgcattgaattcagatttccttacgtgtactcaagaaaataatgggagtgttggatgaaaagaatgaacattgcaatgtcaacacacatttttaggatggttctgggaaaaggctgtgccagctctgccttcccagtacggaggcgtacaggtggagtatccttatctgaagtacttgggaccagaagtggttatgtctttttattttttcagattgtgggatatttgcattacactggttgagcatctcaaatcccaattctgaaatgccccagtgagcatttcctttgagtgtcagcactcaaaaagttacaaattctggagattttggatttcaggttttcagatttggaaggctcaacctatactaggccttgtacccgctcccaatctgataggccaggatgaggtagtgtagttccatatgtgttcctttcattgtgagtgaggtgttgagccccattctctgtggctgctagttatgtgctgggattttctctaaacagcaccatgtgtgtccatttgcctgatttcaggagcagccctgggccccctgctggctgggctcctctccccgtccggctggagcaatgtgttttacatgctgatgtttgcagatgcctgtgccttactggtaagtcggcctatttttagtccaatccaccttgaatgcagatctctgtggttgtgtccaaacactggtggaactttctcccatgcattcctgagttatcagagaggtttgggtcttcccatcttttctaaatatgcgtggtctaaagctccttctctctctgattagaaaaagtcagaaacagaagcaggacagtcttgctctgcagccttgggcgggatagcacaaaggccaggagcgtggagctccgtggctctagatcctgcctgtcacctgtcatgtgtgtgacttgggcaggtttcgtaacctctgctccacagtttccacagctttaaaatgggcatgataatggcacccagtgacaagattgttgtgggaattaaagcagatgatacacagagcctggcctcccagtggtcatcagtgtcctggtgtccctcctgcagccatgctgtcagacggcgggagcggccccaacttctttcacctgaagggatgggagagaataaaggagcaaagaggttgccagtgcagacactgagtcgccttctggcttctgcccccttttctctgggctcctgcttctgtgccctcctgtgttgagaaagtttgaggttttcccctgggtaaggaagaccagtgatgatgtcacagtcacatagatgtgcagctgtgaggggtgcatacacatctttacaagtcacctggccacaaagtccccagacccacagccatgcctctcctctcacttcaccagacaaaaccttaggctgatcccaataaaaatgagttgagaatttcagaaatatcaactcactcaattaaatgaaagtcttatattttaattccaggaaattctaaaactcaacttccccaccacatacaaaatcaaataccgactctcaacctatgaacttactaggtttaaatggctgttctttggatcatctgtgggttcttttaatgcctgaatgttctaatgaagcctccagatggatttccactaagtagcagtaaaattcctgtcattacaactgttcagagaatctgaaatatcttctttagaactatctggtaatatatattgaaaattgttttgatgcttagccaaactcataagaaagtaaaggaactccccaggagccagaattgtaaaggcaatataaatacacaagctcaggaatcaacgggttggggtggttgtgcccacactgggtaagagacaaggcgttaggctggcacaagatgaagatttggaactggagacttcgtcatagagccaggaccctcgaagagccatgcttgcagtgaaagagtatactagatgatatctgcacactggcacaggaagacaatgggaatctgcccatcttagccagattagggggaagaaatctcccttgaaaatttttagccatagacctccccacagtcagctttaatctttgagcttatataaatatattttaaatgagcaaagttggtccttaggcagtaatacagaagcaaatagggacaaatctcaaccctgcagcataggatttctgtagctaacaccctacaaaagatgagctcacaatccaaaataatgaaacataaggaagcaatccacattgaatgacagtaacagacataaaaaatggtggaattggactcccccaaaactgcagataaaagagttatgtaaactaaaaataaatatatgcaatgttactaatgacataagaaaaaggaactgacctcatgaaaaaaagaacaagacactattgaaaagacagagcaggcttcaaaaacaaccaaacaggagttatagaaatgaaaaatgtgatctttagcctggaaaaagactcaatggatgggttagaaaagcaaattagataccgctgaagagaagattactgaagtgaaatatagatatgaagaaattatccagaattcagcacaaaaagagagatggaaaatattagagagaaattaaatataaaatggaggaccaaatgagatggcctaaagttatctgaaagtaattccagaggaagatgatagactggatttgaagcaatattttaagacaaaatagctgagaattttccagatacatgaaagacaaacattcttagattcaggaatcaaatgacttagaattctgtacctagataaacttgcacacaagagtaagggtgaagtgaaaacatttttaaccaaagatgctcccagcaaaaattgctaaacaatgtatttagagaaggaagatagatccagaaggaaagtctgagatgcaaggagaaatgcaagcaaaaaaaaagtgatattcctaaggatgaatctaaaggagtattgaccatataaaataggggccagctaactgtggcctatttttgtgtgatcctccagctgggaatggtttatatttttaaatatgtctttaaaaaatcaacaaaagaatgtgcaacagaaaccatatggctgcaaagcctgaaatatttactatctagacctttacagaaaaagctttctgactctcagtttaaaacaacagcaataatgactaatttgggcaatataaaaaagaactgaaatactgaaaatgtaaggtacaagtgggacaatgagagttccagtacactgcagttcttatgttgtcaagccaatagcaatagaatgtgtaaccttcaaggcaatacagggaaatgaagacttaatctaagagaacctagggtcaggggaagcatagaaaaaaacagggtaaatacagaaatacagagcaacatggatgaaaatgatcccagcatgccagcaacacagtgacaataaatggacttaaactcatcagttaggagcagagattgtcaggttgcttttaaaaatacaggcactggttatttacaagaaacacacctgctacactggaattccgaaaagacaaaagtaaaagaatgggaaactacacgacaggtaaataataaccagaggaagccggatttgctgcgttggaagaaagagacctaaagctgaagcacttgggagacgggggcttgtcgcagtggagaaggaactataccaggatgtgcagcaggtccgtgagcttgagttgggcttttcaaacctaagaactagacatacctttttctcttcactgatcaacatgctttttggtatcttttcaccaaaatagacaagtgtttcctcccgagtctggagctgagaacctccatgatctgagcaggtgtcctggggggccagagggcaccatgcttcctgcctcacaacacacactgatggccagctccagggcctgcaggactgcctggcgcacgaccgaaggcctcaggtctccagtgcgtgtcgcctgggctcctggagttggtagggcccctccttgttggtcattcttgcatgcgtgagccaaacacgtgggcatgttttgaaattggatctctgttcttcagaactgtcaccatttacagttcatcccgtacccacagataacacttgctactatattcttcatctttttctctcttaatgatcagcttttcataatcataggcctcttcgggctagcacttttcatacatcacacttggcaggatgtagatgtgggtaaggtaccagctcaaacacaataagcctgtgccggtagttggagctagaggttcagattcacacagatggatttatttaacaaaaatcttgctattgtcaccagcactattgttcgtacctgccgtgttcccacgacctttaccacctaattgtcgcaaacacctttcatgcaccaagcagagcagctggatgcatcttatctgtaggaggggcccctgttctctccagcttgaactcacctcatacaagggactcctaagctcctacttgaaccacaagcacctaagaaaatagaagagtttctgccttctagagctctggcctgaggcttggtggtggggccatgtgtttggtttttaagtagcccctcgagaccctccagcaccccttccctgcctcccctggaccagtgatccaccctgggtctgagggcatctgctgccctctaagaacgaggggccacgtccagggagagccctcctgtgggctgatgtcccacttggggagagactggatccacactggaaaatgcactagttaaattggaggtagcacaatcatttgtctggatttgtaggctggcgttgagccctcaaacatgtgaagggcacggagttaaagctctgggtccggcgaggagccaaggctgaggcagtgatgttggtggaaagccctgggccccggccaggcctggcctccaaggggctcccagtggggtgcggctgtcctgtgacagcctcttcagaccccagggctggcgccagaggaagtgctcacctggctttagagtcacctgagaagctcgcaggtccacccactgggccacccgcattatggtcctcttgtctttatttcctttttcccactgtggacatttcatgattggattaattttagtctaaacgtgacttgaacccagaagtagttcaggctgcatctctcccaaaagccttgttttcagggcagctcctggttcttcgtgggccttcatcagacagccctgccctcatcagacagccctgcccacaggagcccaggcctccggctgagcatgcaagccccgctgctcttgcagggaggccaccccagggaaggtgctgtggggagagagccacccgcccaggccttgcgggccaggtcctcatggtgcccacggcgcgggccgccctgtgcctgctccagtaacaggtgggctcacctttgttttggtgcagttcctgatccgcctcatacacaaggagctgagctgcccagggtcagctacgggggaccaagttccgtaagtcccactcgggccctgtctccgtgcgtgaaagccggctccaaagtgccttctgtcctatctgccttctgcacctggctttcctgaaagaaagaaaacgcgtggcttatcttttcacggcacgccaccttcactctcactttttcttttctaataaatacctctggatgggttagtggtaatctctcctcaaaccctgagtggaaaatgtgagggaattgccgtctttggcattctgttggagctgcagccccccgagctctccttgccttcctgctcgcccccttctccctccctcctcttttccctccccccttggtcctccctcgctcccttctcacttcttcctggcccccagaaggctgcgggaaaggtgcaagggtttatccagcatccagcacccctgcaggagaggaatccctgctgggccgggagggcagctggctccccataggatttgcacatggtgtgtgaagttcagcatctcttgctgagccactgctggctgttagagcagctcttctttcaacctttctttcagatttaaggaacagtgacaccccaccccagtcccgtggagggggtctgggcccacccttcacaactgcctttcaaggacagttcagacaaagggccctgcatggaaagagtgacctccctttgccttttgcacacgcacctggaaaagacacagaagccaacctgagaacccctggtgctattttaaaggagacatattgctgaacagcagtgagaaaagtctgcaggaactgctgcctgagccaagccagagaaccgaagacccggccggccctggcctcacaggcgtgtgcccatgcagccacccaaatgcacgcgtgacaacaaggccgggagggtggggggggtgcacaggtagccccgaccctctcaggcattccagccacagaacatcaaagtgagcgagtactgcgctggctgtggcttcagagaacctgtatgtgccacatggaaaaacaggacaccagagcccaccagacagtgccggccagcagagaagcagagagccagcgccacacaacatcaagaaggccgacaaccaggttggaaaccaagacggagctcagacccaccacatcgccccagaggcttttccagcacccatgatgtttcggactgacctaaaaactaattgtcgagaagccaagggtgaggaggcaggaagcacctccggttggaggcacccaggcttgccagccacagagcgccccaaagtcaccgtcatcccagcccctggccttcctgctgccctccggggccatggcactgctgttcagctcaggcacaggggcacagcagaggtttgggaagcggtctccccaccggcactgggattggcgggtccaagcccagcaaccggcttcgctccacaacacacaccacacctgggactgtttttaatacatagcaacagactgggttatttatttaagatgtgtattgtgtcatatgaagtttaagagacataaatggcattttgttatttattaagacaaactccaattgttctctggctgtttttttcagttgtgtctagcaaaatacttatctgccctttgaaataaaatgtttttgtttaaaaaatctcagaacactcagagaatgttgatgatttctgcttacatttccattacgctaaaaaagggaacttccaaatcgtgttgtgtgttttgggttttctcaggcttggacacattgaggtttctcgggtttggacacatactgggaaaagaccatttccagcagaaaaggggcctacctctcggtcccttgtttgcacagaaggccaagctgaagtaaacagccatctgggtattttataaatcacgcagtttaaagaatatcctaagatttgtccttgacgaggaggtgtcacaccccgtggtggtggggaaaggtgctgaccttgggaactacatggtggggtccaggctttcaaacgtcctcagaatgctgaccgtccagatgtgcatggtgcgggctttctctggatggagtgctgtggaagttcacttggggacctctcacagcagcagggcaaaggtcagaaacaacacactgtgtgtcccgcagttctcaggggcctcctgcttgagctctgcggagaagcccacaggaggaacagacctggctgtggcggcttctgtgtgccagctgccccactagattggctcactctctttttaatggcaagttatttatacatttaaaagatttctgctaaaaaagaacttccctaaacaccaaatggatggagtgtgtttcccacacacgcagcgcactcagcttgtgctggcctttcccggtcctccacccaatgcttcccgctcctgggagcctcccactttccctctctccctgacctggctccaggcaccagtccagccctctcccgctggtgtcacagtggcctgggctgccctgagcccctgccggctgccatccctgaggacgggcaccagccccgtgctcaccacagggcacctcttccctctgggtgtgcagcactcgtatccatggggtgaacaagcgagggatgacgcagatggcacagtatcattacaggatgcacagagggctttttccataaacaaaattctttgcattcactgccccctgcctctccagaactgtcccctctgaggcctcatctagtcagaggcccagggctggtgggccggagcggaccttcctcaccccatagccaccagccagcattcagcacagcagctttgaggtggcgatcgctatttccccaactcaatgaactaaagtactagaagaaaatctcccacaactcacaaaggaagagcaacttcccatttctgaaccctctgagctaaaccctgagaacttttggaaatggagagtcgatcctttttttaaaatgaagagtatacacacagctatttttttaaagcaatttagcggaaattcaccttgattcatggatggaagatttcattatgacttttaaggaaaaaagtacatgatttcaatataaaaatacatcttcatttgagcatagctgaggtattttccatctgcaaacagccagctctgagacacacacacttgccgtcctgtggaagcgtggctctgcctgtcacgcacgtctgcgcttgccgtcctgtggaagcgtggctctgcctgtcacgcacgtctgcgcttgccgtcctgtggaagcgtggctctgcctgtcacgcacgtgtgcgcttagtgcacatcactaagactctcctattcatgttgacaaaaaaatgccggatcatggaaacacaagctggtgacagggccaacaaaagagctcaaggtgggactccagctctccagcctgtctgtaggtaggaaaaactactcctggaagctcacctcagtgaatgcacctcagagtccaagagctgccgcgaatacagggcctggtggctgctatactgtgcgtctcagagcagagccagctctcccatcgccagcttgtaaaatccaagaaaacgaaattgcttgataaactacgagctgaaaaaaaatgagccctgatttattattattcaattcaacagacataaaaaccactctgctaaatggccacaggaccactccagtcttgactcagcagagcacagctgggccaggtgagaagcaggtgtgagggcactgtgtcccttgcaggctgtgcccacaaggcacccaggctgtcccccacagggctccgatgcgccaggtcacctccattcccaaggctccgcattgacccacagtctctgcacaggacaccccaggtccctggagggcagtagaagaggctgtagcactggctgccaaggcaggggcagctgccaggcccaccagagaccacgggcagtaggcaggtcacttcccagggtggggggggggctgaggtgggagcacaacctaggcccctcctggggaggtggtggagtcagaatcacgtaagagccaaagttccagtccctcagtgccggctccattgtcccctggacttcccttacaaaccacagatgcaaagagagcacttctcagaatctccacacagccacggtggagcactcaacccacgcgaccctcgggcgcaggtgctgggtgactgccctggccatgtgccctgtggcccgcagaatgacacctcatccaggatggaagcgggaaccaaaagcctggctgagagaccccaggggcctgagtcgggaggagcgatggttcatttggaacccagtggtgcccttcactgagtttgggttaactgtcatcacttccctgtcccgtgcgttccaacgtgccctgcccctgagaacagatccaagggactctgaagaacgcagtcctgagctgcttgctcattctgaagccagctcttgttgctggccccctccaagggggcctgtgagctccagacatggggataatgtggggtctgggccacccgtagtggtggccaagtgcagcatgttccccgccacaccccttgggagctggaatttaactccagctgctgaacacaggcagtgtttctggcacccagggcctcaccctcccaggagagtccatcattgctgagccagtcgcaggtcaccatgaagcatcgccctgggcagcaagtgggatgcaggggcacagcagggcacgtcccaggcggctgagaaagtccacggagggcaagggcaggggcgtgcgccatcgtcggagacagtcggggtgggcagcaccctggactgctgggaaggacagtggggggagggtggaaggcaggggagcccttgccagttgagaatttcttgatccttggaattggtccccaacatcctctgggacacgcttaacaatggtcaggtctggtaactgaaagaagcaattgaggtaaatatctcaatcaaccgaggtttattctgccagcgttagggcatgtccaggaaaacacaagccacagacacatctgtggctgtttttctaaagaggcttacaagaggtttggtatttagacattgaggtgaggtgaatggtgacattcttgtgagacttcagttagcacccagtaaatctgcatttcacataaggtaaatatttgaagaagaaaagggagcaaaggaggaatccattttgcagacttctctgggtaggtggaggaacacttgatctcgtcttgtctttggcctgcccctgggaggacaagcttgtaaaggacattatcagcatagaatggaacagactctcattttaggagctggacttacattgcacacctaaatttatgattggcatgtccttgtttatgggaggccagcaaagaatgtactgatgaaagatctgtgggagcacttgcagacggctgtggcctccacctttctgtggggacctggctgatgtatcctattcatgacagctgtccatacggatgcagcgttgcatgattctcactccaggcttaatcttccctttggcataagaagtttgggcatcctgtgatttttacgcccacagccacttttttttttttttttttttgagacggagtctcgctctgtcaccaggctggagtgaagtggcgccatctcagctcactgcaacctctgcctcctgggttcaagcagttctcatccctcagcctcccaagtggctgggattacaggcacgagccaccacgcccagctaatttttgtatttttagtagagacagggtttcaccatgttggccaggctggtctcaaactcctgatctcatgatccgaccacctcgacctcccaaagtgctgggattacaggcgtcagccaccaagcccaaccagccaggccaatttttgaccaaaacaggatcggtgagtggatgtcatgtgtcatttgggccaacagtgaacacggactttgaaggcatcttgatccagaatattccattcccttcttccttgacttggtaataaccaagacggttctgtctctctttgaaattctaaaatgaggcaggcattggacattctgttactgttaaaatccacaccctgcctgcctctaaaaggaacttggagtggagatgcagaaaaatggcaggtgcgtttaaggagtccctgcaccccacgacgaagtgacagccacacccagacatcctggagcccaaaaggaggagctagtggctctggaggggcagcctctccgggtctcaagggctattattattattttttttttttttttggaactgaggtgacatttacataacatgcaaataatcatttcaaagcatacggtcggtggcgtctggcgcattcacagtgctgtgcagccaccagctctctcaaggtcaacacgtctcatcaccccagaagatcactagaacctggtaagcgatagctccccttcccctcccatttaaaatgagagttttcaaggagattgggtccagggtggctgtgagcactaaaattctggagcaaggtgaaaaatagaccccacttctccttccatgctaagccactgattcattaaagaaacacagggaaggagcctatactcaaaattagcatctccagtggaaacatggcttgagaattatgcgtccttacggaccagagaccaggcctccaagaattctcccaggaaacaaatgtccagcaggaccatggctgggctgtcacgtccagaagccaccaggccacagcaggggccccggcaggcaggccaccgtcggaagccggcaggccaccgtcggaagccaccagaccacagcaggggccccggcaggcaggccacggtccagaagccaccaggccacagcaggggccccggcagacaggccacggtccagaagccaccaggccacagcaggggccctggcaggcaggccacggtccggaagccaccaggccacaggaggggccccggcaggcaggccacggtcggaagccaccaggccacagcaggggcccccggcaggcaggccatggttggggctgctttggcctctctttcccttttgcaccagctttcaataaggctttcttcttccacgtccccacgaccccttgatcgtccacctgctattggcagcgaagccttgaggctctcatggtgtgtccccacatgtccgcagacgggaaggagtcaccccagcctcctggggcagcaggatgcagcatatctgactctcatcacactttctgtatctcagcaagttaccaacatttctttgtatttacttctggtaagaacaaaaaccttagctggggccttggctgcccttggagctgctgggaaagttacatgagtagaagggttgggttaaagcatggaaacacctctgtctacaccagctcacgataagcctgaagaggagtttggagtccctcagacgctttcggcaccacttagtcagcggggggaataatagctttccgggaaataggcccgagacgcgggaagggaagggaagggaaccccgtgggaaagaccttactcattctgccccttgcagtcagcacctgaggagaagcagcggggaaaagaagtgccaagctcgccgcgttgaccagtgtcagggccgagtagccacaggacagaactgagaagcgagtaccaacatcaagcctgccgcgccatttatatccacgcatgcgtttccccttacctgcaccgagcctcccgccccgtttacatccacgcaggcgtttccccttacctgcaccgagcctccattcccgtttatatccacgcaggcgtttccccttacctgcaccgagcctcccgccccgtttacatccacgcaggcgtttccccttacctgcaccgagcctcccgccccgtttacatccacgcaggcgtttccccttacctgcaccgagcctcccgccccgtttacatccacgcaggcgtttccccttacctgcaccgagcctcccgccccgtttacatccacgcaggcgtttccccttacctgcaccgagcctcccgccccgtttacatccacgcaggcgtttccccttacctacaccgagcctcccgccccgtttacatccacgcaggcgtttccccttacctgcaccgagcctcccgccccgtttacatccacgcaggcgtttccccttacctgcaccgagcctcccgccccgtttacatccacgcaggcgtttccccttacctgcaccgagcctgccgccccgtttacatccacgcaggcgtttccccttacctgcaccgagcctgccgccccgtttacatccacgcaggcgtttccccttacctgcaccgagcctcccgccccgtttatatccacgcaggcgtttccccttacctgcaccgagcctccattcccgtttacatccacgcaggcgtttccccttacctgcaccgagcctcccgccccgtttacatccacgcaggcgtttccccttacctgcaccgagcctgccgccccgtttacatccacgcaggcgtttccccttacctgcaccgagcctcccgccccgtttatatccacgcaggcgtttccccttacctgcaccgagcctccattcccgtttacatccacgcaggcgtttccccttacctgcaccgagcctcccgccccgtttacatccacgcaggcgtttccccttacctgcaccgagcctccattcccgtttacatccacgcaggcgtttccccttacctgcaccgagcctccattcccgtttatatccatgcaggcgtttccccttacctgcaccgagcctcccgccccgtttacatccacgcaggcgtttccccttacctgcaccgagcctcccgccccgtttacatccacgcaggcgtttccccttacctgcaccgagcctcccgcccggtttacatccacgcaggcgtttccccttacctgcaccgagcctcccgccccgtttacatccacgcaggcgtttccccttacctgcaccgagcctcccgccccgtttacatccacgcaggcgtttccccttacctgcaccgagcctcccgccccgtttacatccacgcaggcgtttccccttacctgcaccgagcctccattcccgtttatatccacgcaggcgtttccccttacctgcaccgagcctgccgccccgtttacatccacgcaggcgttgccccttacctgcaccgagcctgccgccccgtttacatccacgcaggcgtttccccttacctgcaccgagcctccattcccgtttatatccacgcaggcgtttccccttacctgcaccgagcctccattcccgtttatatccacgcaggcgtttccccttacctgcaccgagcctcccgccccgtttacatccacgcaggcgtttccccttacctgcaccgagcctccattcccgtttatatccacgcaggcgtttccccttacctgcaccgagcctcccgccccgtttacatccacgcaggcgtttccccttacctgcaccgagcctccattcccgtttatatccacgcaggcgtttccccttacctgcaccgggcctgccgccccgtttacatccacgcaggcgtttccccttacctgcaccgagcctccattcccgtttatatccacgcaggcgtttccccttacctgcaccgagcctccattcccgtttatatccacgcaggcgtttccccttacctgcaccgagcctcccgccccgtttacatccacgcaggcgtttccccttacctgcaccgagcctccattcccgtttatatccacgcaggcgtttccccttacctgcaccgagcctcccgccccgtttacatccacgcaggcgtttccccttacctgcaccgagcctccattcccgtttatatccacgcaggcgtttccccttacctgcaccgagcctcccgccccgtttacatccacgcaggcgtttccccttacctgcaccgagcctccattcccgtttatatccacgcaggcgtttccccttacctgcaccgagcctccattcccgtttatatccacgcaggcgtttccccttacctgcaccgagcctccattcccgtttatatccacgcaggcgtttccccttacctgcaccgagcctcccgccccgtttacatccacgcaggcgtttccccttacctgcaccgagcctccattcccgtttatatccacgcaggcgtttccccttacctgcaccgagcctcccgccccgtttacatccacgcaggcgtttccccttacctgcaccgagcctccattcccgtttatatccacgcaggcgtttccccttacctgcaccgagcctcccgccccgtttacatccacgcaggcgtttccccttacctgcaccgagcctccattcccgtttatatccacgcaggcgtttccccttacctgcaccgagcctccattcccgtttatatccacgcaggcgtttccccttacctgcaccgagcctccattcccgtttatatccacgcaggcgtttccccttacctgcaccgagcctcccgccccgtttatatccacgcaggcgtttccccttacctgcaccgggcctgccgccccgtttacatccacgcatgcgtttccccttacctgcactgggcctgccaccctgtttatatctatgcctgcgttttcctcttgccttttcaatccagaggcctcactagctttggcctagtcatcctttctccttgtcttctcttcaggtattttattgatgacttcctgatagcaccaaatggctccccgagggctctgaggcattcacacgtgtgtgagagtgtgcagggattccctggaattcagagggactgccttagactaatttgactgcttttgggcaaaataagcttatggcctgaaacttgccgattatcctggcccagccgtgccttgccaaaggtgtctctggcctggctagcgggttggggcagcagcagcaatcaccagtgtgacctgagggcgccgtgtcacaagcgcagggtactttggtggacacctgagaggcaggaatcctgctcaggaggatgaggctgcaggacgcccccacagcctgttgtggtcagaccccgaggatccagtgccagcttgtggtccccctactcgcttactgagaacccagagcctgcccccagggccccgagagcctttacgcacagtttaataactagctgtgactgcacacccatgcaagcgctctcccgggcaggaaatcaaatgtcaccagcactccggaaacagcccttatgaggaaacggcattctggccccgggggttttaactgactttacctggtgggccatgtggatcccctcagccgcgcctctcctctttacagcctttgcccactgtcctactgggccgtttgtctctttctaactaatttgtgtcagtaccttctgagctccgttcatgtctgtgagggttagttttctgcgccctcttgaccaggccttaggacccagttattcaagtgaacactacttaggatgttgtcgtgaaggcattttataaatgtgcttaacatcgccaatccatcaactttaactaaaggagatttatcctccataacttgggtgggcctggttcagtcagttgaagggtttgagagcaaaactgaggcttccccgaggaaggagaaatcccacccgtggactcagcctcagctctggcctgagagtttccagcctgacacctgccctggatttcagacttgcctagccagcccccacagttacataagccagttccttgaagtgaatctgtgtgtgcacatgtgcatgtgtgtgtgtgtgcatgtgtgtgtccatgtgtgtgtccgtgcatgagtgtgcatgtgtgtatgcatgcatgtgtccgtgtgtgcatccatgtgtgcatgcacatgtgcatgtgtgtgcatgtgtgtgcacgtgtgcgtgtgtgtgcgtgtgtgtgcgtgcatgtgtgtgcacgtgtgcgtgtgtgtgcatgcatgtgtgtgcatgtgtgtgtgcgtgtgtgtgcacgtgtgcgtgtgatctccaactggttctgttcctctggctgaacctggaggatgcatcgtctttctgcattgtctacctgttttacagggacctgccttatctttaaaatcagaagtaattaagttcattttaaaagtcaaggcgagtaccaaaaagaatgtaaacactctattccaaggctgtttcttcctgggacagttgtatttttaacacattttcccaagagttgctgcagccactctgtgtgagccccgcatcctaccacagccttagggacagcaaggtcaccagctctagaagctctgccttcagaacggcccactctgcagccagccccatgaagacacctcttgggtgcctggtgttgtaaaatttacccaaatccagagccatgattccaaacctgatggtagaagagcagcattcatttgcttgttcattcattcagcacactcgtattgccaagccctgagaataagcgcagggatacggtaataaaccgggagagccaaatcggccccatggagtcgagtctaggggaagcaatagacgactaacaaaggaacagtaaacagtctggggcaggagcggggggtgtatgattgtgtattgacggtcgtcttcgaggatgggataagggtgtgatggaatgaaccctgcagatctaaggaaaggccattccagaccctagaggaggtccaggaaggaagttcaggagcacaggccacagagggtcactgatttcaccaatttcaccaggatcagggttttccataccactaaggctggagggacaagggacaggagcgtgaaaggagaggcgaggctggtgccccaggaaacccaagcctggtctcaggctggtgaagaggtggatgatggagcgagtggggaatgagtggtcccagtggccggaaagcttgctgggggctgatctggacagatgggaggtgggtgaggtcctgggagcggaggttctggagaccggcgggcatggccaatgatgagccctaggacgtgactctcacaatggggactgaaggggttggagggaggtgccgttggaaaattgcagtaagtgagaagagtcagaaatgggaggaccagagggaaagccacttctcagagaagagtaacaggttcaactttggtccaataatcacaatttagagctgacagcagcttcagaggccatgtgacagataaggaaactaaggccccaaaagcagccgtggagaccagacccaggggttccggccacggctctgtgccttttgtaaaggcagcctatgtctgcactcacctgtgctctggcccaggccggccctgcacttcgattgccgggagccctgcacgcggaactgtgtctgcagaagctccttttggcacctgggagggcacctctcatcagtactccaggacctcggccatcgccacggaccgcagggtgaacgctgggtgggctgtaccatggcctcggccaccgcctgcagatccaggctccctgcagcctgctgggctggtggcctcaggggaccggtgagctgcgtctgcctgggctcccgaaaggccgctcccagattttgattttgctttgttacctagaacccaggccctctgttgccacaagagggccccccagccccggctcactgaggccctccccgtggaggagcgtatcctgtccggtccgcagctcaaatatccagagatcgggagaccccggccctggccccacccccgccccagctgggccacactgccccctccaccacaccccggcaagcccctcctggggctgcactcagtcctgggtgtcagagggtcctctggcttcgcttgtcacatttaatgacaaatcagaaatcaaatgtatccagagccagcctgggctttaggatagaaggggagggcaggagtgggggctccggggacaggggctggccgaggagggaggatgggggcaagaggatattcgtggggcacccactccccacccatccgccaccccctcctcccagggctccttctgaggcctcgctgtccccgccttttagtaaaaagtggagaaacagcctcacagggtgacctgcttcagctcccaaagccatgctgtggctgaccagggtcaggacccaggtaccaggtccacggctcaggggtgggagccaagcctcactcgactccacgctcagggccgggacccaggccacaagcccgacctttgtcctttcctcgagcttgctgggaagcctagactcacccaaatccaacccaaaaaaggctgcaacaaaccagccttgcttgtgatttcgttttatgattttcttttcacattttcttactatgggaattctcatgggtacataaaaatagacagcttaatatgcaccatatcccatccctcagccttgacagttgtcaacagcctgcctttcctgcttcaaatctaccatgtaagccttcattttatctcatatggtttgcttttttttttttttttttttttttgagctggtgtctcactctgttacccaggctggagtgcagtggcgccatctcggctcactgcaacctctgcctcccaggttcaagcgattctcctgcctcagcctcccgagcagctgggactacaggctcacaccgccatgtctggctaatttttgtatttttgtagagatggggtttcatgatgttggcttcacaatgttggccaggctggtctcaaactcctggactcaagtaatctgcctgcctcagcctcccgaagtgctgggattacaggcgtgagccaccatgcccagccttattacgtatttttaagcaaattattggatcataccattgcacccaaacaatgctgccgtgttacacagccatttgtccagcctcctgttctatggatgaagatcaccagggttctccactttccagacgaacgaagccactgacgacccgacaggccacgtgacttggcacagcgcagccctcaggatcagggtcctatcagagccctctggggatgctggttgtgcctggtggcattgcaggagggaacgagccctgcctggactgtccccaggtgatcacacacatgccaccgggatgaggcaggagggtggacccttgtgagaggaacaagccacgggtgctctgtcccctggcatcccctcagcagcaggactctaaatcccctcgcctcctactgaaggaggagagaaatgagtaagaaattgaagttaccactaacgttatttttagaaactgcagtacgaaatgaaaaaaaaatgtctccagactgccgaggaaacgagaaatacatgcctccaaattatatgaaaggcaagaaaaccacccaagtgccagtgactcacaggagctggggtgggttcaatcaggatagggaactcctggagggccttcaactgggcggcaagttgatggcactgctgtcaccctgcaggaaagacccggctctcttccaaagcctccccagccatttgcaagctcagcgtgggaagcaggctgggctgagcacgtccagggctcccaaactacgctggagccaaaatccaggactcccgcctgaattgggatccttggagcggggtgctggagggaatgctgcggcctctcaggtctgtgaccgcgtccacgccaaggcttgctgcatgcaacccgtaagctgagagttgccaccatccagacaccaccctgtgcagcggagtggggcagggcaggactgagagacggtgtctgccctccagaccaccttgcaggcccatgctgtggggctcagtctccctcaccctggggcatggatcaagcaggcctgtcccctctaagaatgccccatctctgtagtcctctgtaaaagtcactaatgctttctgccaagtatttccaattcttgccccttctaggctcctgcagcaattccgctcccagcctcctaccatgttggccaacattttgacacgtgaaccttctgggctgggcatgggtcatgtggcagagccatttccccttggccatggggactggcaacatccgacacgtcggctgctcagtgagcctggtccaggcgtggcagtgtgaggcagagtcccccagcccagtagccccccagtaactgggtaaccaatgtgacaggacggccacggggaggccggggtggtgctcagtgggcagaggtggctcatttacagcactgtgcctgtgacgctgtgggaagccgacctcacacctaacaaaatcgcagctccagaggaggggcctggaaacgatgttagtagtaatgggtgttgcttgcctttggattgctttagaaagatattataaggaaatgatgcactcagaaagtaattatgtggtttgtaagccaggatgaaagggaacggagagttcaattcaggaacgtgcaggactaaacagaagctcctcaaataccaacagcaaaatggtaaaatggaaagatgcctgaagcaacagctgccacaaaagctcaacgtcttcaagagggaaatcaagccatggcctcatgtccacttccaccacatctcttaagagaaaactcaaatctttttttctctgctctcacacaactacaacaatcagcacagaagacttctgtgaccccaaaatatgtggagatttctccccaccagcaagcaagcagtcagcactacagcagacaccgtctgggtgtcctgtaattccatcctgacactctacctggagagagcttgtattccataggatgggggctccgtccccaagactgccccctcccacctcagacaccagttgcaagcctgtgcctctggaacttctgaccaactggctataaatcagggttcccacaaccccatctctgggttcaattaatttgctggagcagctcatacaactcaggaaaacacttatgtttaccagtttgttataaaagacattgcaaaagatacagatgaagaaacacatagggcaaagtatgggggaaagggtgcagagcttccatgccctccccaggggccaccctccaggagcctctgtgtggtcagtgttcagccatcctgaagagccctttcctcttgggcctttcatggagatgcatggggtgggcatgattgacaaccatgtagaaatatgattggcccaaaaggatatggtctaaacccggcgaggctgtctggccacattcttcttggcttttctgggcagcattccctcctccagggtgtggggtaggaccccctctggaatgaggggcttatgacccacaagcagattagggttccacctgcccaaggcaggtgaaaagagggcagaagaagatcagggagagagattctgtttgttagggctgtgggagttataagccaggaactgtggacaaaaccccatatatatatatatgtatatacatacatatatgcatatattaagccatatgtgtatgtatgtatatatacatatacatatatgtatatacatctatatggggttttgtccacattttttatacattttttttatatataagataatattacaatgtctgaatggaccgaagtgaatcatgtcaggtggacacaatggctcgggaaaaacagacaaagggtatggcattcctatgtaagctctgtcgcctcgagaggcctgcaatcgtctctctccataatttcagtaagaagccgaacaaacgcatttttaagaggatggtaacaccaaaggacctataaacctagaagaaaatcatcaattatcattatctgtagcagtttatgttctaaaaagtcactgtaaacacggatttagagatgaatgaaccatgctcctaggagaaagacagggttaaggttcctgagagctctggtcactaaattttcatcaatccacacacgatcttgttttatgtgtgtttctgtttaaagacacctgtgtaatattgttgactcattaacattgaagctttctctaagatgccttttttctctgtctggcacatggcacccggcttcccagtgcttaggaccacatcatcactatgcttgggccaacttagacagcaaaaccacccaaaaaaaaaaaaaagtcactaaggagaccatggaaagacccgtgtttacaggatgagctagaacgagaaggcagaacgtcactgtgtgcaacctcagctgggaacatgcacatcctatgtcttaaactttccccctccctgtatgtgtccagtgacccggagtgccccaagtattgatgtgggggttacaaatacattttccccagcgggtgaattcacagactgcatttgtgatcgtttgagaacttgagaataacccagggctcccattctttgaggagtggcagagaggctgagaaagtggggactctccagtgcctgggacgcaggtggcccaggggacagaccaaaggaagggccagtcactgccaccaagaacatggactggggcctgcctagggaggagagctagggccacatcagggagtgtcccctaccgaactgggatctccggctggccgcactccacgattgccatgtgcttgccactctgcccctctctgaatgggggctggttgctattgtctctgctcccacatttcatagtaaacaggtaggaaaagtgaatgacttgtctttccacttcataggtctccagtccagaaagggcctgtccagacccgctgaggaccactggacaccacccacaatggagagaccacctagatcgccagggcagccgtagcacttccggcaggactggtgggaacttcaggtaggactggcgggaacttcaggtgggagagagagaatgttcttcatacgtgaggggaagaagcttgaccttgggatggccatgtgatgtcagcactggtcagttacttctggtttctctactctgggagggtggcagtgtggtaggcgggtccccaggaaacagactcagattcagaccctagcaggcaggaggctcatcgtgaagttcccttggggtcaagggtcatggaaaggaggcagcagaggatggcacagggagagagacggcagccttgagcccccatggagagagagaaccatcccatcacgcttggcccaaacagccatgcctgaccttccctaggggtcgttcaggcctcctctgcggcaggtgctctctgggagcacctgcctgttacacacagatctttgcacctcctgcccactcccccacgtccaacccatgcctcatccctgactgcccatccccactctccacatcgctcccattctgggttcagccggcaaagtcgttggccattgcccatgggttcagagatcttctaacctcacagccacttacacagaggggatgaccactgggagaatgttccctcatcaccctctgtgttagtccgttctcacattgctataaagatactacccaagactgggtaatttataaagaaaagaggtttcattgactcacagttctgcatggctggggacgcctcaggaaacttacaatcatggcggaaggggaagcaggcacgtcttacgtggtggtgggtgagaaagacaagtgcaagcaggggaattgccagacacttataaaaccatcagatctcatgagaactccttcactatcacgagaacagcatggggaaaacagcccccatgatccaatcacttcccatcaggtctcaccctcatcacctggggattacagttcaagatgagatttgggtggggacacagagccaaaccatatcaccctctttaaagggcagcttgctgagactggagtatggcagccaggcgatttgggctggccccacaggcagagcagacacctccatgaactgaggccgggcttgtccctccctcctcagttcaccagaaggttcctccactggggctgtggggactgctgtggagggtgggggggggtactgggcagctgccgctgcttggcctcctgctcctgcttctgctgctgccacacgcacactcccacctgtgatgggttatttctgagtccccaacctcatgacccaggggtgagacagaatccagctcatctgagcagttccacatgcacaatcaggtattccatcaccccaggccccaggagcacatcaacagggacttttcagaatttttcgcagaatcctctgccgcagatggcacggctttgtttctgaatcccaggggcctgcactgtgattctggcatagtggtttgccataaacacacagcattgctttcccacgtctgatacctctcataacacagggtccgaccagctgcagggcctgagtcacagggctgccagcactgcagcctcgacctgctgcaggctcagggaaggccgacagcttctcctatcaatggtacataggctggagtagtcttcatgtgtgtggaacgtgctgcctccagaaggcgtactggcattgtctgtctctcttggtcatgggagatgcaagatgcagtaattggctctttgctgtggacaggaggcccagtatgctcctggttatgggatatgggacctccccaccaagagtgttattagtggcagttcccagaatctttgtaggatttgtctgccagctgcaggcactcaggcatcttaccaagactcccagtgtgttagctgcttcttggttagcacccggccagcgcaatgtaatcaatgtggtgggccagtgccatgctctttgggatatccagcttgtccagttctctctgggcttccttagggcatagaatacatggtttattagcacataacactgaggcaaagccaaggtccactgttattcatcctatgtgaaggcaggctctttcggatgctctttcctcgtaggaatagaaaagaatgcacttgccatctcagtggggcagagcacacacctgaggctgtgttgatccaccttgaccgagatcccgcgcctggcagggcagctgccgctgtggattctccttggtgcagcttgctgaagtccactgtcttcctccaggagtctcctatttctgcagaggccagcctggtaaattaaatagagatacattgaagaccaccacccctatccttcagctccttaagagtaaaactgagtcacaacagcttgcataaatcctgtttaaacatttcaacttacataatcctatcaacttttcatttgtatgctgtggtcctattaggggtggaaaatatctgagtctcatggtaccacatatgttaccagtggaggtatccgagttattggcagtgaatccttatgggtctgcagcaacctcaattcttgcctcctcagaagaaagaattagactgaggggcataaggcaaaaaaagacaccaaggcaactttcagaagaggaatggaagtttctttcaaaaggctttagaacaggaaagaggccgggtgttgtggctcacgcctgtaatcccagcactttgggaggccgaggcgggtggatcacgaggtcaggagatcgagaccttcctggctaacacagtgaaaccccgtctctactaaaaatacaaaaattagccgggcgtggtggtgggcgcctgtagtcccagctactcgggaggctgaggcaggagaatggcgtgaacccgggaggcggagcttgcagtgagccgagatcgcaccactgcactccagcctgggcgacagagtgggactccgtctcaaaaaaaaaagaacaggaaagaaagaaaacacacttgggagagacccaagtggaaggtcgagtgcagtggtcgacctaggttaaccatgatcctaggactttccaggctggcccctttcccatggttcttcccttaggatgggctgcccgcatgcacatgccccccttacccttgggaggtgagcacacacagtgtgtttaggaagtggtacgcatgcccctctgaggctttcttcccttttcctgtggtgtgcccctggaaggtcacattctgccattttgtttcttaatgcacatggctgggaaggtgcttctccctggcgcctgcattcagtgaacactttagtgcaacaggtgtagaccatcaggaaatggcctctcactggtgccggctgccaatttatcccttttagagagacaatgtgatcattgccaaagcatcacctgacgttcctagtgggtgggagaagagctctctcctccctctgctcatgagtgtctaactatacctgtaacagcaccaggaacttcttttttcaacccccagaccattcttccctctcttgtaaaaaagatttaggttcccagcaggggctgagccaagggtctctcttgccaaactttaatctggacttatctgcatcagcgttgccctaggtaactattgctcagctttctcattgcaatctttgccctctgatttttttttttaatttatccaatctgggataaatacagaaaactggtttggggccctttaacattgtgggggccagtggaggcttcctttggttcacccaacttttgacagcattgattaagacctttgtttctgctgggcgtggtggctcacacctgtaatcccagcactttggaaggctgaggtgggtgaatcatttaaggtcaggagtttgagaccatcctggccaacatggcaaaaccctgtctctactaaaaaatacaaaaaaattagcagggcatgttggtgcacgcctatagtcccagctactcgggaagctgaggcaaacgacttgcttgaacctgggaggctgaggttgcagtgagcagctgagattgtgcagtgccagcctgggcaacagagcaagactaaatctcaaaaaaaaaaagaaaaacttttattttaactccatcaatttccattttattcttttgccgctataagatatttgaagagatttattctgtgccaaatctgagtgaccatggcctgtgacacagccctcaggagttcctgagaacatgtgcccaaggtggtcggggcacagcttgtttttatatattttagggaggcatgagacatcaatcaaatacatttaagaaatacattggtttggttcagagaggcgggacaactcaaagcggggccttccaggctataggtaaatttaaacattttctggttgacaattggttgagtttatctgaagacctgggatcaatggaaaggaatgtttaggttaaggtaaaggattgtggagaccaagttttattgtgcagaggaatcgctcagatagcagacttcagagagagagagagcaggttgtaaaatgtttcttttcagacctaaaagggtgcctggctcttagttgattatctccgggatctggaaaaaaagggaaggaaaacaaagtgggaagggcattctctatagaatgcggatttttcccacaagagactttgcagggcaatttcaaggtatggcaaggaaatatattttggggttaaatatttttttccttgtctcataatgttatgccagagtcagattgaaagtaagtcacaatatatagggttaaataaaacccacctgataagaatttatggtttgtagggcatgattccccagaccccttaagtaggaatttgggcaagataaaaaataagaaaaaataagtcctccattcattccatttcttagtaattatctaaagattgccaccctgggataagccccaagactctctcgtctttcctcttagcctcatctatcaatttttaaaaatttatttaccttatttttattttattttttattttttatttttttgagacggagtttcgctctttcacccaggctggagtgaagtggcgtgatctcagctcactacaacctccgtccccccgggttcaagtgattctccttcctcagcctcctgagtagctgggattataggcacctgccaccacgcccggctaatttttgtgtgtgtgtttatttttagtagagatggggtttctccatgttggccaggctggtcttgaattcctgacctcaggtgatccacctgcctcggcctcccaaagtgctaggattacaggcgtgagccaccacggtacctggcctatttaccttatttttaaataaccatttaaaaatgtccacttccctttgatggattctgactcttccttttgcctttcccctgctcttaactaacctcatgtttttatcagcatctgtaagacccatgagaagaaaccagctgcttcatctgaggtgctgcacttggcatttatattggagtcagaccgtcccttctcagggtaaacagaccttccagtgccttttatccggttccccaggctggctgctccctcaggaatactctcctgtgtgtctggattgtgtatacccagctgcattgttcagtggtgagtgtgggtcctgcatcaacccaaacatgctctttccctctgcagcattttaaaccagagacactgctcccaaattagtcactctcacaatccattttcataaaggttcttcagggagctgatgatccagatctacaaaatggaacaattccttcacacgcccctctagtttcaatagtcgcttgctttttcccttcccgaacattgactatcttcttggtaactacaggtctcaaaggtaatttcttttgttcctggcataattttcccgtttgtgggtagctttgaggctggtgatctgagctcagacagactcacatctgagctcagacagacccagatctgagcttggtccagccccaaggcccaacccagcattctcttcctttcattttgaaacaatctttaaatatcctctattctacataaaattgcttttcctttcagcaaaaaccacgtttttataacctttaccaaacacactctgagtaatcccaatttctgctgaaaaccctaggattaatttaacataacatgactttaagatcttaaattcctgaagagaattttgaaactggttttatttaccatagattaccaaaatcacatgtgctaaaaggcattcgagctaccatctatttttctgataaaatatttgatttaagcatgtaaatgttctccttcatatattttggtagtgctgggaatgcaaaatgcttgttccctggtgccataaagaaatagcacttgagggctgggcgtggtggctcatgcctataatcccagcactttgggaggccgaggggggcggatcatgaggtcaggagattgagaccatcctggctaacacggtgaaaccccatctctactaaaaatatacaaaattagctgggcatggtggtgggcgcctgtagtcccagctactcaggaggctgaggcaggagaatggtgtgaacccgggaagcggagtttgcagtcagccaagatcgcgccactgcactccagcctgggcgacacagcgagactccatctcaaaaaaaaaaaaaaaaaagaaatatcacttgaacataaatttaattctctcagcaaggcaattttcactttctgcagaaagggtacactcaccagcagtcttgccacaagagtacaccaaacaaaggaaaagcagatgtatttatcccttacgtatttgggtcatccttactgctgtgtcctgcatccattggctggagccgaacctcacagtctaaactgacactcgacttgctaacaacctaaaactttcttaaataggtaaaggcaaagggagaacaaaggaaaggaggaagttgcttatgaaagatttaaagaagcaataacatttccaaataaggaaggggcataggctgtgagctggaacgtgcctgtgagcatgtccaacagctacataggatagggcttaacaaagagttattagcacaaagcaaggaggcttgaagaaagtcagtctttaaaagaaactattatttctaacacttatgatttattctttaacaggaagggaaactttgaagaggaaactttttactttctacagtagcgaagtgtcacatacgcatgacacatatgtagacgtagcagacacagcagcagatcttatacatttaataagatttttcttttgccattttttaaagattctccctcactttagactattaatctcttgatttcctgtttcatgccctaaacaaatgttagggagaaaattctaaatctgcatctcccaagacaggactctggggaaacaggtagaaaggaacagaacttcaatctaagcaaaagcaaggtctgttatgtagactttaagccattgtcttctccatagagaaagtttctagtggtttcagtacggagacagacacgcccttacaaatggagattccctctaaagatgtacatttcctttacaaagcgtgttgaaggctgattcgttggataggcggtcttttcaatttagcttgtttcttaattagattactggctttaaggtagagccctttaaggaccaggaccaagaaagcatgcaggttttaggacctaaaccacgactttcttattcaaacgtgcaaacacccaagtacccccgtatcaatgatcgtttccattgcacgactgtcctgagccacctccaacactatggctttcacccgccatcaaccaccagccatcacacacatcaaggtcaagtcctctcacagtgccaagcagtctctagtgccctacaaacagccagcgagcccagtaacacagtacaagagagcagagccctagacctgaggggaacctgtctgcttacaacctaggatgccacgaggaaaaacaggttcctcccaaagagaggagactggtgccttttccctgttccccaaggatcctaggctgtcagaaatttccttgtttaggtcctcatgtgtcattgaaggttgcaagaggaaagagggacagacagaagcaaacagagaaacagacagggttctcgactgagaagttttacagagagcagaggccgtaaagcaataagcaagccgggcgcagtggtgcaagcctgtaatcccagcactttgggaggctgaagtgggtgaatcacctgaggtcaggggttcgagaccagcctgaccaacatggtgaaacccaactctactaaaaatacaaaaattagccgggcatggtggcggacgcctgtagtcccagctactctggaggctgaggcaggagaattgcttgaacttgggagacggaggtgcagtgagccaagatctcaccactgtactctagcctctagcccgggtgatggagcaagactccgtctaaaaaaaaaaaaaaaatagcaataagcaataggcgtgaacacatatacaacccacatggcagattgaaccaagttaccttttgactgccaagctcttttaaaaaccttttcccagttgtaattcctaccaaagccattttactttgcctctgctgctggctgggctccatcaccaaacaggcagcccctagaagcagccatccacagcagtagctgctcaccacccttccttaccgctatgtgatggatggctctcagctaatgattgctttaagcatgccagcagtttagggacatcactgcattcacacacatgcacctaaaaggcgaaccatgctgctccacgtggaagtggctgctgcctgggatttctcccacagatgcttcattccctttgcacatttcttggtctctcagtccacgttttacagtgggcaggtctaggcaaaccagccccaaagtccaaagaagctgagaagctgacacattgagtttcttagaaatgtttcatacggacttacaaagagaagccatggctgtgtctcaggtggcaacgagatgagatggtggatccctacccctcagccccagacccagagcttatatagcacagggaggagtggttcagaaggaatgtgcaggatgattgaaggatgataatgtcaaggttgtttgacctaagggcaggacctacagtaagtagctgctcttacacagggagtggtagataaactggaaatcttagaggcctcctcagaatgttaatcataagccaatgtaaaccaaaaataaaattctaagtcccccagccatctgaatgaatgcctcctcttggccaagggcattccaaagttaacctgaaaagctagttcaggctgtgatgggaatcaggagccagacataccttattatcccctcctcccttttggcattactaatagaactggtgaacaaaaggagtcaaactctgtaaaatatttgaagagatttattctgagccaaatatgagtgaccagtggtccgtgacgcagcccttgggaaatcctgagaacacgtgcccaaggtagtcagggtgcagcttggttttatacattttagggagacatgagacatcaatcaaatatatttaagaaatatgttggggctgggtgtggtggctcacacctgtaatcccagcattttgggaggccgaggtagggggatcatctgaggtcaggagtttgaaaccagcctgactaacatgctgaaaccccatctctactaaaaatacaaagaaaaaaaaaaattagccgggcgtaatggcaggcacctgtaatcccagctactcgggaggctgaggcaggagaatcacttgaacccaggaggcggaggttgcagtgagccgagattccgccattgtactccagcctgggtgacagagtgagactccgtctcaaaaaaaaaaaaaaaagaaagaaaaaaataaaagaaacacattggttcagtccagaaaggtggaacaacttgaagctcaggggttgggtggttataggtagattaaacattttctgattggcagttggttgaaagagttagcaatagaaaggaatgtctgggttatgataaggggttgtgaagaacaaagtttttttatcgtgcagatgaagcctctaggtagcaggcttcagagagaatagacttaaatgtttcttatcagacttaaggtctgtgttgatatccatgctggcgggtacaatgaggcacgtctgacccccacttcctgtaatggcctaaaccagtctttcaggttaaatttagaatgccatggcctagaaggaagtccattcagatggttgggtggccttcaaattttatttttggtttatagaacagaatttttaagtctaataagaaacatttacaatctattgtctctgaaggctgctacctggaggcttcacctatggtctccacaaccccttatcttcacccagacattcctaagtctttcaacagtaacttaactctttcaaccgactgccaatcagaaaatctttgaatctacctatgacctggaagcccccaccttccagttgttccacctttccacaccaaaccaatgtacatcttccatttatttgaataatgtttcatgtctcccatgaccaccttgcacccagaccaccttgaacgcatgttctcagaaccttctagggctgtgtcacaggccatggtaactcatatttggttcagaataaatctcttcaaacattttagagtttgactcttcatcaacaccaatatattagtcctttctcacactgctataaagatactacctgatgctgggtaatttataaacaaaggaggtttcattgactcacagttccacatggctgcggaggcctcaggaaacttacaatcatagtggaaggtgaaggggaagcaaggcacaacttacatggcagcaggagagagaatgaagagcgaactgctacttatcaactatcagatcttatgaaaactcactcactatcataagaacagcatgggggaaattgcccccatgatccaatcacctcccaccaggtccctccctcaacacgtggggattgcaattcgagatcagatttgggtgagacacagagccaaaccgtatcaaccaacatggcagattagcatccaggctggagctgctgtggcctccacaaccctctgtctcagtgccataatctctggtgtataagaaagatttatgttatttctcattcatactccatgtgcactgcggtagttttgggggcttttctctcactctgggatccaccctaatgaaacagccaccaccttaaaggttgaaagagaccacgcctcagggaatgagacctctgatgcacattacctgtgctcacagctcattggccacagcagccatgtgaccgcacccaaccacaaagctgcacagctcattggccacagcagccatgtgaccacacccaaccacaaagctgcacttgtatgagggcaagaccaacttcttcaaagccagtcactcaaaggggattccttagaaaggaattccccagggttggttgtcaacactggctaggacttccagtacaatcttactcagaagcaggaagagcagccatcattgcctcaaaggaacatttcacttttaattatgatggtttctgtaggttttggggcatatatttaatcagattaaagaacttccattatagtctagttcactaagagtccttttttaaaattacaagtgtacattgatttttttcatgcctttttcctaatctgagatggtttaatcctgcctttaatagttataaaactattcacatttcatttattattaattttggtaagtatatttctgttgtatatttgttttctatttcaataatttctgtttttttccttccttctactttgtttgtatttgtttttgttctaacttctttctttttttgaaactaggtcttgctctgttgcccaggctggagtgcagtgtcacaatcatggctcactgtggcctccacctcccaggtttaagcaatcctcctacatacctatatatgtgtgtatatgtataatagaatgaaaatataacgaatttagaattgttatatcttcccggtgaataaagcatccttctttgtctctaatatatttgtctccaataattttatgcctaaagtcaattttgtctgatattagcatatgtacattagctttctttttctgagtattgccacattatgctttttccattattttattttaagtcacttttattcttacgttttcggtattgtggaatgcagcaaagcaatgcctagagagaaatattgatcttaaatgcatttcttcagtttaaaattttttcttaatcaatattttttcaagtattttttctgagcattcttttccacttctccttttcagactccagtaaatagtttttaaaacttctcacagtatcttctatgttttttaccacctcttttgaatgttcaatttttatgtccctatccatgcttgattctggatagtttcttttttttttttttttttaagacagagtctcactgtcgcccaggctggagtgcagtggcatgatctcggctcactgcaacctccacctctcaggttcaagggattcttttgcctcagcattctgagtagccgggattacaggcgtaagccaccacatctggctaattttttaaaatatatttttggtagagacaggatttcaccatgtggaccaggctggtctggaactcctgacctcaagtgatccacccacctcggcctcccaaagtgctgggattacaggtgtgagccaccgtgccaggcctggataatttcttttatccattttcaagttcactaattttcttattagctggcccaatgttctgttaaacccatccattgagttcttaatttcaaaattatatattgcagttcttaaatttgtatatgaactttttcaaatctgtcatgtctttctaaaatagtttaacggtcttacctatttaaaagctttacctggttggctgggcacagtggctcatgcctgtaatcccagcactttgggaggccaaggcaggcggtctcaagttcaggtcaggaactcctgaggtcaggagttcaagaccagcctggccaacatggcaaaaccccatctctagtaaaaatatgaaaattagccgggcatggtggcatgtacttgtaatcccacctacttgggaggctgaagcaggagaatcacttgaaccctggggtcaaaagttgcagtgagccgagatcaccccactgcactccagcatgggtgacaaagtgagactctgcctcaaaaaaaattaaaataaaataaaaagaaaagctttacctggttaatttcagtatctggagcccatgatggttgaattttattgtcctcgtttctgtggattcttgtccacactgtcttttctttttgtgtgtttgcttattttagattgtgtgctagacattgtatttggaaaaaaaaatacattttgtggacacaatctgctgatacactctttctctgcaaattttttgtaactaccaagcaactgggtatattcacaatctggaatcatcttaatctaattttagaaattgagatttttctggaccctcgagatatctaaaaactgaaataaagttattgaaatgatttgtctatttccggctttttttttttccttagatgtaattcttcaaagtcctaatgtgaagaagaagggttgctaagacccccaccctcaaaattggagtgtctcagatgctaaattttgtcctttattcctacagaatggcaaaaacatatggctccacctcttaaccatctcttccatgactaaaaaaacactcccaaggaaaaattgccccaaatgctgggttcatttgcctgaatttttatcttcttcctcatgttggcccagtagttttttgctatctcactagcccatcagtattcaagtattttttttttttaagtattttgttcaaaagtttctggctatctgccaaaagaaggttggtccatattgcttagttcaccattactagaaagagaagctttatactgtcatgctcagtagaaatttaaaaatagctcatcttcttctgacaccaatacatcatagcttcgtattttctcactttgacagcctggttatgctgttctatactcttgaatacaagtgggaaaaaacaatttggtcaaactttttaaaaagtttggatgcttgagcacagactaaccaaaaagtctgaatatgatgcattccaaagattctgagtccacgggttgtctagagttcagaatgcatgtttccatgcctgacaggccaacccacaggaacccctcatggggctgagctacggaggctacagcagtggcccaaattctgtgttatggaagcagcaggtacagatagaaagagaactacaggagaaagaaatgtgccccctctcatgctagggccctcacgcatgaaggaccccaggagaaaatgtcagacaggccttccctggggttggcatgtgcccgctgtattagtctgttcttacactgctataaagaactacctgagactgggtaatttatgaaaaaaagcagttgaattgactcatagttctgcaggctgtataggaagcatggctgggagcgccgcaggaaacttacaattatggcagaagagtgaaggggaagcaagcaccttcttcacgtggcagagcaggaggaagagaatgaagttgggggctggtcgtgctaggcacttttaaacaaccaggtcttggaagaactctatcaagagacagcaccgggggatggtactaaactattagaaaccacgccatgatccagtcacctcccaccaggccccacctccaacactggagaattataattcaacatggatttgggtagggacacagagccaaaccacatcacccacctctctgcattctgagcacactgcttcccttattccaaactctccaggtgccctgggccttcctgaggtgctcgggacccaatgaagggtccccatccaccctgtcctccctgctcaaagtgccccatgctcccaaatccaaccgttccctccaataataaaacctcaaattctctccttgctggccacctccgttcagagttgagggagggaagaaactgcaaactcatactaatcccctgccagtttgtcttagttttcaaagtgactcttcttataacaggtgtaacaagtgaattgatcatttcgggcaaggaaacagagcagagaggaagcctgaaggcaaagttggggaaccgatgtggaggcaacagttagagagaaggtcattgaggagagggcacttccactgccgcctccctcagcggggtcctgcctttccagcccctctccctccaaatcccaggattctctcagcgccagggccagggatttacttccagtggttctgggggtgtccatgtggtattaaggagccacaactgacagaggagatgggataggggcacttgggggctgccctgaggctcctgggacttactggatttatgaggatttatgagaatttaggaactaggcatccataaccctaggagtctctggactcatatttttaagatttttgcctcagataaataaaatatttttataggctacaacgttgctgctttttttctgttctttaaatcatcagtttaaaaataaattgcattcaagttttcattcctggcagggtgcagggttaagccgcctacatttgactttaacagatgatttcattgcactcaatttttttataaaacagaaaaccttcctaggttgttgcaaccacaaagaggaggctactatataagaaggtaaaggattcttaacacaccgcagagccgcacaggtctttgtcgttagccaagctggatcctggcaaccacctaggacagtcaacgtggggttttctattttacaggtgaagaaaatgaggctttccggtctggctgctcatccagggccctggttcccagtacagcgggccacgctgggctagggtattatctgtgtgtctgcataaccccctcccgtggttgacagagtttgtctgatcaaagcatctttagtggaaaaccacactcaccacagggctattttcacacacccaaacttcggaatacattttttttccagagaggacttctctgggacaaagtaacacttttacatcccactgctggtctgggcagtcaactccctgatgtctcggtttctgaacataccttggcaaactccaagaggagtccaggcgagaggaatggtcctgtgtaggcagagacgccccaggcagtgccggagctgagcttcccaggcagaccctgttgccctggatctcaccccgggtctagccctgctggcagacctgtgaggtgttcctgaattgggttcagatgtccccccagaccagccctcttacaggcaaagcctgtcccaatgctggcccgtacctgttgtcacaggacctgagctttaggggatttcgcaatttcagatgaggaagctgattaatgagtggctcagaacatggaggacgctgggagcagagccgagcaaggcaacctgcagcccgttcctgccccatcagatgcgcctcggggcttggggctgcacgtagtcacacgcagtacacacacacaccacacatacatcacacaccacacacacactacacacacatcacacaccacacaccacatacacacaccacataccacatacaccacacaccacacacagtacacacacaccacacaccacacacacatcaaacaccacacacactacacgcacaccacacaccacatacacacacaccacacacataccacacaccacacacaccacacacaccacacaccacatacacacaccacacgcaccacacaccacacactacacaccacacacacaccacacatacatcacacaccacacacacactacacacacatcacacgccacacaccacatacacacaccacatacaccacacaccacacacagtacacacacaccacacaccacacacacatcaaacaccacacacactacgcgcacaccacacaccacatacacacacaccacacacataccacacaccacacacaccacacaccacacacaccacacaccacatacacacacacaccacacgnnnnnnnnnnacaccacacacacaccacactacacacacacagcacacacaccgcacacatcacacacacacaccacacacacaaacgtaccacgaatgcacactttcacgcacacaccccccacacacaaatacacatacaccacacacacataaacttaccacagatgcacacatgcagacacacaccacgcaccacccccacagcacacagaaacacatacacaccacacacacaaacgtatcacagatgcacacatgcagacatatccacaagcatgcggacacacatacaccacacacatcacaccatacacataccacacacacatacatactcatacacaccacacacccatatacacagacaccatacacacaccacacacacatattcacacagacacatacacaccacatatacatacacacaaacagttgcacatacatacacacagacacacacaagtacacacactacacagacaagcacacacatcacacacacacacagacatgacccctagccatgcccaactttgcactggtcactaataatttttctggttctaccaatatttaccgctctgatcagggaagtgtctgcatttttctatttcaaagctgttctgtaggtatcacgtcgggggtggtaatattggccaccctacgtcctgtgtgcagagaaggaatgaagagcgatttgtgaacgcgaagcagcaaagctactaacgggtgcagttaagaaacagaacaatcaagaagaaacaagaaaacgccctccaggaaacagaaaccgggtgcagaggcactgtctgcagacctactggagcctcaggcaacctgcggaggaaaagccccaaagttcttttcaatctttgctcctgatagagaaagacggtgttgcaccgttcttttcatttgcatgcgtggaatttccagtgaggtccacgctcgctggctcgctggcagctccgtggaatccgccccacccttgcagagctctttcattgatttgaaagagcctctgtgtgcacatagtgcgactgttccgaagtctttatcacagttactggtgatgcttttttccagatgtcctcgacgtgcacccatgaagggctccacctgagagtgccagggtcctccgtgggatggggctggagggggtgctcttgccgtcctgggctcccaagcagccataggaacaatagggtgatggggtcccagagatagaggccagtgacagcagcgctttgaacccctcacacgggcacgggccctctggcagggatgggcgtcccggtcacacggagatgggggctgctgctgcctgcaggtagaggaagggacgtgtttggcagtcctgtgacccctgggcacctcgcctcccccacggccggctctgcttgtaaacagacaagtgcacaagcgcagcccggtgaaggcacagcggtcccaggaggcatctgggctgcaccccagcgagccgcccatacacgtggagatgccggccaaggccctgcagcacacggcagaggaaggcgcgatgggagccatgctgggcccggaaggtgccgccgcccggagctgtagccatcactccagctcttcttttaagtgttcccagaaattgtgacccaccaaaatctgagagcacccgacagtaagccagaggaccttgatgtgagatcccagcacggtgtgggggcggactgtggtgggtgctgtctcggcccccaccccttccacaggtcggtgtgcacatcccacggcgcctgctaagctgcagtcttctccaaaggggtcactctccgtgggaagggagccacccgcccccgggtgatgtccccagtcagtgactgacgacagtccccagccgaggtgagggaccagctcctgcatccctcactccggggcttgcctgtgggccagggtgggggcgagcctcagcagagaccgcgtcccccttgcctgtcctgccctgcctcccctgcctcccccgcgcctctgctgagcacgcccagagggagctgcttgctgcggaatccccacgtctagagaaggcagcctgagacacagcggcggtggacgcgcactcagccatttttcctgagatagggatggatttatgttgatcttgccacatctttctactgcttcctctaaggtgcaaatatttttaaaacagctgtggctagtgaagtctcacatggtctcagaatcattccaggtgcagagaaagcccagatgttgagccctagcatacggaggccttaggagtcaatgacctgagaagcttccagcaaagcaccagcacgaaccgccccacctccccacctccccgcaagcgttgtcgggactgacagattacagagctctgctccctctgcactcctgctctgccacccccagggtgtcagaatgtgccccccacacagtttccaaaagattccacacatctggctgggcgtggcggctcacgcctgtaatcccagcacttcgggaggccagggtgggtggatcacaaggtcaggagattgagaccatcctggctaacacaatggaaccccatctctactaaaaatacaaaaattagctgggcgtggtggcaggtgcctgtagtcccagctactcggagggctgaggcagaagaatcgcttgaacccaggaggtggaggttgcagtgagccaagatcgcaccactgcactccagcctggcgagagagtgagactccatcacaaaacaacaacaacaaaaacccacacatccaacctccagttctcccacaacagaatccacagcaggaaggacaaagatgcaaaaggacgttttcacaagacttgcttttcttatcagggaagaaaatatttcccagaaatcccagaaatgctccaggtgccttcttcacgtgtctccttggtcagaattgggtgacctgcagacttctggcttgttcacagggacaggtggactggacagccatggttggcttgcaccagaaaatagttaatcctggggctggggaaatcactgcttaaataaaacagaggttcattagcaacagcaaagggcttagagccaacagtgcctgccaccctccacccttagagaattaaaccagtgctggagtagagcgtcaccaggtggtggaaggacctttgatggtgctgatctcagggtctatatttagtatctaaaataattaactggttgttcactgcccaacactgtaattcattcattctttgaacattcgttaagtacttatcactgatatttcagacagtattatagatatagtgatctttatcccggctccttatgtaagcaatattaccaataatagagttgaagataaaaggaaggaagcaagcttccaaagaaataacccaacgcagaatttaataatgtctcattaacctggtggttgttcatcagatactctgtggtctttattaaaatgcagctgagcaggcagcatcccagcacttttcctgtggtgaggaatctcgttaagttggggagcaaggcccccaagttttgccacaagagcaggaaaagacgaagttctttccttctccctggaagcttagatgtggatttgtggctctcggccagacaacttactgaaacgttggtaagtacatgcgcctgtttgagatgtttgcctgtacacccgttcatgaatgctctgtgaggtcctctctggctataaggccccattgttttaaagacagcaacttacaataacttaaaatgtctgttttgcctggacccaccatggaaagaattgaattaacgtgaagtgtgttgcagtgagttctgtgatgtataaattgctgagaacaaagcaaagcaagggcgaggggcatctgtgactacactgcagaaacgggagaggggccggggccgtcttcagaggtggctgtgccgtgacagtgtctgcaggcaacagtgttgtcgcagatggccatgggtgatctgactatgctctcagccgctgggcctgcctgggcccctgtcctttcctcagctggctctccagcttttcctcaatcccatgactgttgattattcaagggaggctggtttctgtcgtttcaaaacaggaatccaggcccacgtccctcaccagggaggattccctgactgctcacctgacaggtgctgctgactggtgcacagggctggcacccccaactgtacactgggcaggtacctctggctgtaggtagggatggtgcccccccactgtacactaggcaggtacctccggctgtaggtagggatggtggccctcactagtaccccaggccagttcccatgactatgcaggaggctgggacccctgactgtacactcagatgggacccctgactctaccccggggacggaaaccctgaccgtatgccagacaggtaccctctgactgtaaactaggatgggatccctgactgtactccaggcaggtacctctgttaactgacaaatgatgaggttcatgaatttcagaaggagagttttatttctcatagagttgcagcctgtgcagtggccattatgacaggctgggaagtgtagcctccagccagaagccacaaacaggcacctcaagggaggagcaaagggaagaggaatttatgctggtggcgtggctaaatatatatattcaattagctctaggaaagccatgaatatttatttatacaaggagaaacacatgcaactgagcttcaggcctctccatggggagcatgttaaaaaaaaaatggcagcattaagctgggcacggtggctcacgtctgtaattccagcactttgggaggtcgagacaggcagatcacctgaggtcaggagttcaagaccagactggccaacatggcaaaaccctgtctctactaaaaatacaaaaattagctgggcatggtggtggccatctgtaattacagctacttgggaggctgaggcaggagaattgcttgaacctaggaggcagaggttatagtgagccaagattgcaccattgcactccagcctgggtgacaacaagaaagaaaaacaggccgggcgcagtggctcacacctgtaatcccagcactttgggaggccaaggcgggcagatcacgaggtcaggagttcaagaccagcctggccaacatggcaaaacccgtctctgctaaaaatacaaaaattagctggatgtggtggcacgtgcctgtaatcccagctactcaggaggctaagagaggagaatcacttgaaccagggagttggaggttgcagtgagatgagatcacgccactgcactccagcctggtaacagagcaagactccatctcaaacaaaaaaagaaagaaaagaaaaacaaaaaaatggcagcattagcaccatccaagggtggagtgtttggccctctgacatcaaaaggtgaagctgagggcacgaaccctcactgggcatctgagggcacgaaccctcactgggcatcccctgtagaccatctagatccactccacggcctctcgtcgggcaggaatgctggtcggttgcttgttgaaagcacacaagggaggggcggagtccagcggtgggtggatatcagggaggagtctgttgaaaaggctggtttctgtttagccctgaggaaagaaacaagggaagttaacgagggaggaggcataacaagttatgtccaacctcccatcccatcagggccaggaactcggtttccctggagttcctctgggctgagaggaagacatctgttcagtcagttggtggacttagtagttcatctttctcacccgtgactgtacacccggcacatacccccgaccatataccaggcaggcatctctgactgtactcccggcaggtacccctgacctaacatgtgactggtacatgagctggtaccctggctggcacacattctttgtaggtccagtcttactgacatgctgaaacaattagctgtgcttttatttctaggtttcagacccatcgtaaggccatggtcaatttctcttactccccaagggacacagtcaagagagattgttgtcacataggggccttctttcaatgaatatgtttgcatctgaaagaggtaacccacgattgcctgccagaaatgagggaaacagaccgtgtcctgaactgcttcccacatacaaatcaccgcttgtttcccaggacatctcagtgccaacaactccctcgcagcacatgactcccccggcatcttccgaaggcttgtattttctccacgagccattacctcttgaaaaactttcacaaagaagacgtaagggcttaagtggcgtggaaagtgggtttcacacaatgagtctatttgaaaagatcttcaggggcttccaaatccctctctccgggagcagtttatacttcacaccgctcatggcaacactgtctttaggttaattcaattctttccatggtgggtccaggcaaaacaaacattttaagttattataagttgctgtctttaaaacaatggggacttatacccagacaggacctcacggagaattcttgagcgcgtatacagacaaaaatctcaaactggtgtatgtacttactgagatttctgaaataggaaaaatctactcatacccctatgaggaataagccctcctcttgtccccattgctggcagggcacactgtctcgtgttctcttaggacaatgctcagatttgacgtgttgtcactgtggggtggcctgcagtgcagattcctaacatgaatgtgattcattcaacgcagaaactctagagagctacaatctttgtccgaaatggtctaaaagtgaaggtgaattaaggcatggctcacaggaattattgtcaacttgacttgacaaaagttgaaaaggttgaaaatggtgccagcaggcacaggtaagccctctaagtcaaatcatctttttcccgtcagtgctttcatgttgtgtgtgacgagtgaaaaacgtgatattcattcctgcttcaaaaacttataagggactggctctggcaatagaaagctggcagaaatcatagatttcaggaataaatgtaaacatctgtccaagacatcccatcttctatatggacgagttaaagcacatccagaaatttataccattttttgtattagtatatgaaagaaatgcaattaaaagctaaaaataagaaaacatctactattaaaacacaaagacatttacaaagacagctgcacctgtcacagcatagggtaagcgtgggtcttaagctcacctgtccattgtcagcaatttattgggaccttattgtaaacaagaaatgggttaaacagtaaaggtgccagacaggtcatgaaacacctgatctccatcttcaagcagcttatgctatagttgactgtcaggaatcaggaaaaacgcacttgttcttgttacccaagacgagcgatttagcagccttctaaatagctttgtagaagtcagatgttttattctaccttataaactgtgagtccaaggctgggtgcagtggctcacacctgtaatcccagcactttgggaggccaaggagggcggatcacctgaggtcaggagttcaagaccagcctggccaatatgacaaaactccgtctctactaaatatccaaaaattagctggttgtggtggtgggcgcctgtagtctcagctactcaggaggctgaggcaggagaatcactggaacccaagaggcggaggttgcagtgagccaagatcacactactgcactccagcctgggcaacagaccgagactccgtctcaagaaaaataaaaaataaaataaactgcaagtccaacactcttgtttggccgttcaattcgggctgcatagatgctgtaaaagtatagacagttcccacttcaatccttctctactttcctttaacatcaacaccatttagccagaatgacaagtagtcggaatgccagagagcagaaacaacaccccggtgcttgccctcattcctctggatgagtgatgctcaccaatgtgggctgctcttcttccccagacagggtctgtgcttctcccctaagccccggtgccctcatgcaatccagtccctccctggagttctttgctccgtgtctgtctccacgccaggcctctatgaggatgagctgtggttactcaaccaggatctcgaggccccagctcagtgtccaatacacgtcagcattcaaaatcatactactgaatgaatgagtgaacagatggtacatcaacctatttgctatttttcttcacaagggcattgcatagagctcttcggttcaagatttagccattgtcatatacccactgctggtgaacttgaaggcatcactttcctccactcttgtaccagcctgccagtgactgaacttggtgcaggatgggtcactgccatatcagagatgccagctggcctcccctgtctacctggtcatcacacagggcaggaggaatccgtcagcgtctggtgccacgtgcctctcattagaaggctgagcccatctactgcccagacactgctgccttttttcacgacttcctttaaaacaaatgaattcctatgatgtgtctggcatcatgctgggtgctgcagcgattacagagggaaaaaagatatacttccagtcctcaaggagtttgcggtccagtagggggataaccacatctagatcatgtaaaccaaaagtaaaatcctaaggccctcccccacctccacccaaccatctaaacggacttcctcctcagccagggcagtgttaaaatttaacctgaaagcctggttcaggccatgaaggacgtggggatcggacatgcctgattatgtttacctctccagcattaacgtcaacacagaccttaagaaacatttcacagcgtgttctccctgaagcctgacagctagaagcttcatctgcatgaataaactttggtctttgcagtgtcttatcgcagcccaaacattcctttctattgatcccaggtctttagacaaactcaaccaattgtcaaccagaaaatgtttaaattcacctatagcctggaagccccctactctgagttgcctcacctttctgaaccaaaccaatgtctttcttaaatgtacttgattgatgtctcatgcctctctaaaatgtataaagccaagctgcatcccgaccaccttgggaacatgttctcaggacttcctgaggctgtgtcacgggtgtgcgttctcaaccttggcaaaataaagtttctaaattaactgagacctgtcttagattttctgggtctacaaccctgctgtaccagcagagtcaggggacagccagagaaagaggttcagggggacgaagcacccccagcagggccaagtcaccttctacagctcgactcgctcagccatccaagaccacttggctttttttttttttttcctgcacaagctgtgctttgaagtgtgtggggtcttaaaaatcctgcccattctattttgatcaggcttctgtcatctgcattgccatcctgggacaagttgtcagtcactgtctccctgaaatgcacgtggagatgcacaggctaatctagggacagctggatacatgactaatattaccgaggagctaacgagagcctgtgacgttgagatgctgaggagatggactggtcgtaagcgttccccaggtttatagccttcttttcagcacccctcatgccttcctgtggttgtcagcatcccggattatcctgatcatggggcaaagagaatgggggctttccccagggccttgaagtggcagctggacccacattgcaggaggtctcaccctgcaccagcagccccaccctagccccagccacaacactcttggcccccagctgtatcctgaatttgcagcaagcaggaagctcaacacaaggggagaagagcctgtgggttctttagaatgcagactaccaggcccaccctcagagattctgatccatttggtccaggctggggcccaggcatcaccatttttaacactccccggcagatactcacaggcacccagagtccggcaggagtccctgctctactgaaggactttctaaacgggggactcggagccccagacagtttcctcctcctgggctctgcttttaccgggctctggagcacgttcctacaaacatctttactcaaaacactgactttttctgaaatgtttgaaataatttagcttatttcacaggagaagccactatttcttttccaaaacaatttagtaaaatggctgtttttcatacccaccaatttctaaggtgaaattttgtgtaaaatagacacacacgctagtcatgtaacaccagccaaggttgtttgtgtgcctagtgacattctcagcatctgtgaagcaacgagtgtgcgcgtgctcttcccaggcgtgggctccgccgcacgtggtggaaggaactctgctccacattgaggagcctggtttggacaccaacaggctaagctcccacataccccaaaaacacctggcccagggatcagcccttccaattctacaacgaggtaagtcacggaccagcacagcctcgggggcaggtccaagacaacggctgtgccttccgtggcaggagctttcggaacagagagcacgtcatccctggtaccaaccaaattgtatcttctctccccaaattcatacattgacaccctagcccccagtgtgtctgggtttgtagtaaggaggtcattaaggttaaatggtgccctgagggtggagccctcatgataagatgaggccctcatgagaagaaatgggagaagctctcctcctttctctgccatgtgaggacacagtgagaaggcggccatctgcaagccaggaggagggccctgggtcttatgctgccaggctccagctctgtgagcaagttcacttctgttgtataagcccccgctgtgtggttttcgttatggcaggcagagcacactaagacgcaccttggccatgctcttctctccctagcaatgcttctcttttgctgtgtagtgaaggtcagccattgttcaggtaattaatgctctcccgggtctggccccagtaactttctggtgttatcaccacaaccccatcttcaaaacccaacgtcaggccaagctgacccacactgtggatcgattcatggatggacccagatgcatgggaagtcctgggtacatttcatgccttttccagcaatgcagaggggccagaggggtgcagccacacacagggggccctcagctcctggagtgctagcacttagcccacaggctgctcactccccagagcgcgctctctctgctctcttctttaggtgaatggtgccggcagaaagttgtgtatacgtgccataggttcctaatgagaagggtcttggacatcactctctcctctgtggagttcaggtttccattagagttgtacattgctctctaggtccctgaagtcttcaatcgttttttgtttcatttcattatccagcctttattgaaaggatgctgtccaggatgccaggtccaggcttgggagaggcagagcgagtccctgtctcttggaacctggggcccaatggtcaatacagtaatgaaataaatgcagttggacaagccaagtggaataacctttagaaagaaggcttttccgtcttcctaaggttttatccaaagcaagccgtgatgccggtgtgatcgtagtcatggcggcagttctgaagcacacacagatctaccttatcttccaagggctgttcctgaaaggctggcaaagccaactttccccattgtacttgaaagctccttgcaatgagatctgagctgcggaagtcacagtgcagaggcaggtgctgttgaaggctgtgaaacctgagtcatttgaagaaggagacgcggggagaagtgtcccagttcaacctcggtggatgggaactgggtttgaagagaacaccagccatggctccaggtgggccaatcaccgaggagacacacacgagccctgtgtgccactgggcatgaaagttttcatcttttcctgaaaacaattgctggaggtgagcgctggttccttcagctctgaactcctctttttctgccttgtctttacttctttggtacagcattacttgtcagatgcaggcaggaagaatagacatttagacacacttcacactcggctgtgagcctggcgctcctcctaaacatgctattcaaagtgcttggctgcctgtctctggcccacacctgccagcgttgacaagtgccactgagttcatgtcaactcaggcgcttgtcagagggaatctagaccaggctggggctgagacaggtgggcgatcctcatcccactgcctcccactaagacataacattgtgtggaacaaggaaggactggttcaaagccacagagctggttacaggcaaagccggaagcagaacctctaacttcaggctcacgtcaaaaatgcccatagagtgcatttttttctgttaagattttagaacttttttcattgaatttaatcatttctgatatatttgggcttatgcctaccattttactatttgttttccatttgtccactatgttctgtaccattttttctcctttttgccttctttaggattttcaagtatttcttatgaccattttgatagacagatagatgatagatagatagattagatagatagatagatagatagatagatagatagatagatgatagataaatagatagatgcatggatggatggatggatgggatagatagataggtagatagatgatagatagatagatagatagatagatagatagatagataatggaaggatgagagagagatgcacggatggatgggatagatagatagatgcatagatggatgagtggatgggtggatggatggatgagatggatgactagatagatgaatggatgagatagatgatagatagatagatagatagataaagagagagatagataagacagataggatagatggctagatagatgaatggacgaggtagatgatagatagataggatagatggctagatagatgaatggatgagatagatgacagattagatagatagatgatagatagatagatagatagatagatagatagatagataagtagatgaatgagatagatggctagatagatagatgaatggatgagataaatgatagatagatagatagatagatagacagatgatagatgatagatagatagatagatgatagatgatagatagatagatagataagtagatgaatgagatagatggctagatagatagatgaatggatgagataaatgatagatagatagatagatagatgacagatgatagatgatagatagatagatagatagataggtaagtagatgaatgagatagatggctagatagatgaatggatgagataaatgatagatagatagatagacagatgatgatagatagatagataagtaagatggatgagatagatggctagatagatagatgaatggatgagataaatgatagatagatagatagatagatagacagatgatagatgatagatagatagatagataggtaagtagatggatgagatagatggctagatagatagatgaatggatgagataaatgatagatagatgatagatagacagatgatagatgatagatagacagatgatagatgatagatagacagatgatagatgatagatagacagatgatagatgatagatagacagatgatgatagatagattagatgatagatagacagatgatagatgatagatagacagatgatagatgatagatagattagatgatagatagacagatgatagatgatagataaacagatgatagatgatagatagacagatgatagatgatagatagatagatgatagatagacagatgatagatgatagatagattagatgatagatagacagatgatagatgatagatagacagatgatagatagacagatgatagatgatagatagatagatgataaatagacagatgataggtgacagatagatagatgatagatagacagacagatgatagatagacagatgatagatgatagatagacagatgatagatgatagatagatagattagatgatagatagacagatgtcttctattgatcctgcctctctggagagccctgcctaagacagccaccttgtcaccagtttcctgtttgtgctgtctcctgtctctggcctgcacctgccagtgctggcgagtgccactgtgttcacagcaacttgggtgcttctcagtgggaagcactggccccaccggctaacgcttttgccattgcccgtgagtctgtaaacacgcaattgtactttcagccaaccctactttcgtgtgaagcatttcgtggcattctgcccccaggaggattttccttctgcattgtctttgagggtcacctgctgggtggcagtaccttggcccccacttctcacttgtgtagcctacagccagaccctctgctaactgggcctgccctccccttctccatttgctggccagagaaacccctgtggccacaggtgtggtggagggagggctagtgaaggagcgggacagcttctcttaagtctgagctatgtgtcttccaggtgaatcaggccagctctcccatgtgaaaacttccactctacaatggaattctgttgcacgtatccaagtttatggttcaggtctcatgatcacttggtgatctcctctgtttggggttgcagcactccctttgctataaaacgtgtccccgttggagatgatgggatgtgaacaccacagtgactggtgagtgagctgttctgcaaatcccagaacagcagtgccagcagaggtgcggaggccagggaggacacatcgatttgtccctgtgaggatgaagggctgtcccctccacagtgggaggggctcagcataattaatctgccaccaggtcatcggtttgtcccaccagggaaacgctggtgactcagcgtttgtccaagacctggcactcagtgggtttggcaggcagagcggctgtagtgaactcaagcacagcctccgacattccacacatgcaaactgcttggggtcttcattattttaaaaatttttttttaattttttttgagacagagtctcactctgtcacttaggctggagtgcagtggtgtgatcatagctcactgcagcctcaaactcctgggatcaagtaatcctcctgccttggtctcccaaagtgctgggattataggtgtgacccaccaccccggcctggttttccttattgattggaaaagaaaagaagatattttctaggcaatagctacatatcaggtcctggggctgattccttccggtaaagataccacatctagagccacaggtgggttccagcgtcaccatgtgatcacatctgtgaagaaagagccactgtcacactctaagatccacctgacttttgcaccaactaaaaaggggtgctacctgggcttatggtgtaaatccccaccccagcgtttctcaggcctttgctgctgccccagcgttttgcagtttcccctggggtgcagtgtaggacttggttaactgctttggcagaggtgtgatgtggagggcagatccagggcttccaccacaggctggatgtttctgccccctacttacacatatatgttgaattttcttccttacatacatatctcttaggaggctacccacctaattcattttgtaaccctgtgaccagctagccactgccacagatccccaccaaacagtgggaccaccagcccttcccattttgatggggaagttgcacccccttgtctctgattggcttctactacaccaggattcttcttagaaaggcagagaacccccagccctcctgcagactgtcactgtctgagcccaggcttcgatgtgccagcctagcagactgtcagcaggtgccactccagaggctccagtcaacacacctaaccattggttctcagccctggctgctcattagattcacgtgggggttgtttagcaatcccaacgcccagcctggcatggtggctcacacctgtaatcccagcactttgggaggctgaggacggtggatcacctgaggtcaggagttcgagaccagcctgcccaacatggtgaaaccctgcctctactaaaaatacaaaaattagtcaggtgtggtggcatgcgcctgtgatcccagctactagggaggctgaggcaggagaatcacttgaacccaggaggtggagttagcagtgagccaagatcgtgccactgcactccagcctgggcaacagagcaagactccatctcaaaaaaaaaaaaaaaagaaaagaatcctgatgccgaagccctgtcccagaaaacggaatcagaagcgctgggggtgggactgaggcatctatagcttatgcagctctgcagggggctccactgagaggtaaggcccagccccgtcatcctgtcctgcgtcccggtggctgccccatgtctcaggattggcctcatggagcttgcgcatgtgcttctctggttcctgccgacacaagtgagaaggcctcaaaccctttccatggatgggaggccgcctgccccagggggtccgtcagggctgtgttgcagcctgactcctcccggctactcaacacctggtcccaagcggccctggggagctggttggtgtgcaggacctctggccccaccctgccccaggcctagttcatgggaatctgcatttcaatggaacaccctgcggtcgtagagactggggtgcaggttatagtctgagaagggaggcgctggtctcactctcactgtgggactggtgggaggaaggtggttggggatggtagagggagatgaggatctggatggcatgagccagtgaggtcatggcctgtccagtcattgaaagttgccatgcagaggaggcctggtgtcctcagacaaagcagcgaggctgccttgggggcaaaggaggctccggacttgggagttcgaaatcttcagcacacatgctccagtgccttcaccccgtgtctcagggtcccacttcacccaccggtgcccttctctccaagcgaggttctccaccccacaccgggaccactgggccaggtcattctttgctgtggggccgtcctgtgcactgtagggtacttagcaccgtcctccatctctgcccaccagacaccagccgtatccctccagctgcgacagcccaaatacctccagatactgtcaaaagtcccctggggtgacatcatcctattgagaactctgtcacgcagcctgagacctggccacatgtggagtgttcaccatctgcccaaacaagcagagccaagggctggcctttgcggcaccttctctgggactgcaggtgacacgggctccttcagagctgcccctctggttcttgactgcaggtccggccattgcaagttttccttttcctgtgtgggtaaggagaagccagaagacccaaactctcttcaatcacaaccattgccatagcaactccggcttctctcccagcacctcagcctcccctgcacgccattccacactgacaccagcaatgatctgagtcacggagaggctgccgtgcccctgtgtacccacggcccatttccccctggcaaggaagttattccatctcctccaatatgtgaccaacctcatccctgactccacctggagggtctgccttctgggccactcctgtgccaactacctggaagtttccaacagaaaacgcatctagaatgagggtaattgctggggggaggggcatttggaaaaggaccattataaaggtctggacagggtcccggtgaagcctaagggatggtgtggtgacctggggctagtcacagtggcactgttaccaccctgcctgaaaggggtgtctggagtggccaccaggacctgaaagaaggctgtcacatgtgggaggctgccccaggcagagccgtgacctgaagcaagggagaggtaacttcggccagccagaggcaacttcccagggactgagggcctgacctctccatccaccctccaagccccagccagagctcgccatcagctgaacccaaccagaagccagagatcaggggcctgtgttgtgtccacactggtgagcccaggaccggtgaagtggaggagttgagagccaacctggaggggctggccctgtgcacagtgctgcagcctgcaggccttcctgacgtctaaccccattaccggcagcttcgaccgcagttcttccttctgctggggcgctctgcttacctgttcaaggctgctgccttctcaagcaggctcaggtcagaagccgcctccctggaggctttcctgaccctttaccaccagcagtgactcccatcccctagcagggaagcctcatacaggtaggagccttgtgctcctaacatcagaaatggtgccagtcataaaataagtgctcgacaggtgtgtgtctgcctgcctgctgacttctgtgactgaatgtattgacatttacctgacccaaacctgcatcatcatgtaataattcatccacccagatttgtatgcctccatgcatctatccaagcatacgcatatatacatacatatatacataggtctaagcactcatgcacacatctatccatccatcatcctcctattcctccatccattgtccatctgctcacccacccacccgtgcatctgtccaagcacacacgtacatccatatatacccagatctaagcattcatgcatacatccatccatcatccttctctccatctgtccattgtccatctattcatccacccacccacacatcaatccaagcatagacatatacacagatctaaccacgtatacacacatccattcatccatcatctttctctccatccatccattgtccatcttttcatccacccacctatgcatccatccaagcatagacatatacacagatctaaccacgtatgcacacatccatccatccatcatccttctatccatccattgtccatctattcatccacccacccatgcatccatccaagcatagacatatacacagatctaaccacgtatacacatatccatccatcatccttctctccatccattgtccatctattcatccacccacctatgcatccatccaagcatagacatatacacagatctaaccacgtatgcacacatccatccatccatcatccttctctccatccatccattgtccatctgttcatccacccacccatgcatccatccaagcacacatatatacacagatctaagcactcatgcacacatccatccacccatcattcttctctccatccatccattgtccatcttttcatccacccacccatgcatcaatccaagcatagacatatacacagatctaagcattcatgcacacatccatccatcatccttctatccatccattgtccatctattcatccacccacccatgcatcaatccaagcatagacatatatacagatctaagcatttatgcacacatccatccatcatccttctatccatccattgtccatcttttcatccacccacctatgcatccatccaagcatagacgtatacacagatctaaccacgtatgcacacatccatccatccatcatccttctctccatccatccattgtccatctattcatccacccacccatgcatccatccaagcacacatatatgcacagatcttagcatttgtgcacacatccgtccacatgtgcatctatccaagcaaacaaatatacatatatgctgatctaagcatacatatatacagagttaagtattcatatacacatccattcatcatccttctctccatccatctgttgttcatctattcattcacccacgcacgcattcacccaagcacaaatatatacatccctatatacacagatctaagcattcatgcacacatccatctctccatccatccattgtccatctatttgttcccccacccatgcatccacccaagctacatatatacattcatatatgcacagatctaagcattcatgcacacatctatgcatgcgtccatccatttgagcacctatccacctatccatcactcatgcatccatgagtcgttcatccatgagtccatcaatccattaacctgcccatttaagataaattaataagttctcctatttctttcagcaccagcatcctcccatcagatgcctgtggcttgtaacattaacctcttcttcaacttctccctggcttcttctcccagaggctcatgcagaaacacagagtggcactgagctgcaaatgctgagactgagaaagccttgcctcctgttgaggtctgcgcagatcgcctcctcacccagggcaaaacagctccttggtcagaggggccgaggggagcatcctcacatcatcccctggggcgggcaggcagggcaaccctcactggccacagcagtgtttcttatttgcccctcagttaaagcacagattagaacacagggaaccttagtgcatattccctggttttcattttgtttatttaaagacagttcttttccttcctccgtgaggcagctaagtagatttaacagtgattcattaaagctctgtctgcagatcatcaaatcagtcagtggaaaggtttacattgagtcaaatcactagatatttcctccacatagtgataaattcccaacggtgagtagcttttccactgaagcaaatggttgttttcatgttctgtaacactaatactgtaacaatgtactattgtgtaatatattaattacagcctgcaagcatcataactcagctgaagaagccttgcgtaattttccaaagacgtttttgccttttcagttttgtgccatttcatacaccgttgtcttttcttttctaaagcacaaggccagcgtattaaaccaacctgtcaagaaggacaaataatggcatttattgtgagcatgggttggtatcattttttaccatgcagcccatgcacataattacatcaggcccatgtgcctgatcacagcatctcttaaaaggatcaatctaagttgcaaaataagacaaaggaatatttctaaagtattaaaggactatgcattttcttaagccacaattatgagattttcaaggagtaagcctcggaggctgtatgtgttttgtaggtgggattagtttaatcagcctcagccagaataagacactcgtgtccagttcccactggtgctaaaccagctcgtgcatggtattccacagcacacacacgggcacacacagacatatacacatgcacacacacttacacatgcacacgcatgcacacacacaaatatacacatgcacacatgcacgaacacacatgcacacacacacgcacacactcgcagacacatacacacacatacacacgcacacagagacacatacacacatggacacacgcacgcacatacatgcacacacacgcagacacatacgcatgcacatgcgcgcatatacacgcatgcacacacacatgcacacacacacacacgcgtgtgcacacacacgaggaaagctgactccagtgacccacacctccttctcagaagtaccacagcgctgagctctgatctcacttgcgaattctgataagaagcgacatatcctagatgggaagggggcgtgtgaccatgaggcgacgtagcgtctgcgctgcatgggagaggcgaagggaacgcaagaggcagacggtttcttcacccttcagcaatcggcaaaggacagctcgggtgtcaacagacaactggtgctgagggtcacatagcacgaggacgtcacatgttccctgatggatcgtgctgggcaacttttgaccaaaatacccaggccagctccgctgactctcaagcctcagacaggggggctcctggctacagctgcagctgacagtgcaggacaaccccagccaatagggcagcctgcccccacgctcacccgcccagccccattgcaggaggacaaagccaacaggaagagcctcagcgctaccccagagggaaccctgttccaggagctgacccggcacccaatactttaataatgcaccagtgttaccggctggacttctgggggccctaaccaggctccctcagtctggcttggggacttttcaaagaggcagtcactttggacgacaggcagaacaaggtgcctttcaacattgtgcttgcgagttccgttttaaccctgggcttctcgtcaggaggctcacagcttaactcaaaattaacgcatggtcttcttccagcccatggagggtctctgttcttttcacgccctctctgggttaaagattctctggcttgtctgacagccccttccagtgtctttatatgttttctcacagcctttgctggcttgtggagctgggcacactcctcgcctcccacacgtgaaaacatccttcctatcatctgagcctcgaagcagacccgcggcgtgcagcctgggctgagaggaggaaatgagcagctctccgggccccttatggaacattctgcagaggagtggctcaattgtccatgaatttcatggctgaagtttagctcctcaaacactgctggggctcagcctcctggtcggggaggagggactgttctgcagccacggccttggagccgggaacagggtcccacccggactccctaaatggaagcagtcacatccgatgtgcccctcccccaccctccctcgccgccacattcaggtggctaggtcctgtgcgcccatcccccggctggctggctctccaaacttccatgcacatgaacgttggaaccacacaattcagcaccgcatggcaggtggcttggtcagcttcttcactgctgggggggaggtaacacatgagcaagaggaggctggggtggtccatgtggcaatggattagaattgaagggaccaataggagctcacatctgacttaatatacacacagaggctgggcacagcggctcacacctgtaatctcagcactttgggaggctgaggtgggcggatcatgaggtcaggagttcgagaccagcctgaccaacatggtgaaacccccgtctcttctaaaaatacaaaaattagcctggcgtggtggcatgcgcctgtaatcccagctactcaggaggctgaggcaggagaatttcttgagtcggggacgcagaggtggcagtgagccgagattgtgccactgcagtctagcctgggcgacagagcgagactccgtctcaaaaaataatatatacatacacacacagagtgtgtatatatatatatacatacatacacacacacacacacggaggccatatgtggaattggttatggatatgtgtacatacccatgtcagtgtacacgcaatgctttcttgctctgtcagccgagagggcctagaagcagggacacccagtagcaacaagcacacctagcacccaggccttggtttctaataccctctccaggaataggaacctgggctccttggagaaatggctgattctacaattggggcaggaaatatacaagatgagcctggaatgccctgtaagtgccagaataaaaagaagtgctcaaaaacacaggaaggaaaacaggctcacttatggggtgtgtcacagggccacaggatccaaccgaaggagctcccaatggccaatgctggaacactgggagcaacatttagtaaagttgtatggaattgtagcccacagtatgagtccatacagaataaacaaaaatggtggaagagacaaatacgtgggggagaagaaacaaatgtcccatgccagattccaaatgacgtgggcagacgccccctcgaggaggtgctgtggaccccccaccctaagcgtgggctgtgcacagtgactcccttccagagcacacggcctggagatagggagagagagggtgaccttacagtggggaagcctgactcacagcacctcagccaggtggccaaggtcaacgtcaacaggaaggactcctttggaagtgtgtgcctttgacatgatttggccacaatcgccctgctcctttgtggtcttccccctcaaacacccttaaccccagtctaatcaggagaaaaacatcaggaagatactaactaagggacagtctacaaggtacctgactaggcttcctcaacactgtcaagatcatcaaaagcaaggaaaggccaggaaatcgctacagccaaagggagctgaggacacagaacgactaaatgtcatgtggggtcctggatgggatcctgggacagagaaaggacatgtttaacaaaaaggaaatctgaataaacatggacttcagttaataataaagtatcagtattggttcatttattttaacaagtgtaacttcctgaaggaaggtggtaaaactggggtagggtctatgggaactccatgcactatccttgcaagttttctgtagatctaaaatagttctaaaataaaaatttgattttaaaaatataattagtgaattaaacctgccactcctgggtattactgcttagaggggaccccaccatagcactcagggcacccagtccccccactgaaatggctcaccgggggcccagctctgccctcagggttctctccagaacatttctcatgaagttttcgggaagttactctctttctaccaaggttatgaggctggtagggtgtgagctctgggcagccagccaaccctgatactggccatacgggaggggaaggcctttgggggaggggaggggagagagggaaattgagtccctgattctacttggcgtctaaagccagatcaatctctggactatttagttatgagtcaaaacatagcctttgcttaagtttatttgacctgagcttccttcttctgtagctgaaagcattctcacacacctgagatacgagcaagatttgctagtcctgtgttttagacaggaaaagaaaaaagctttggagagccatgtatggtgtcatccaataatgaactgaaatttgtattgggcacctcatcagtgaaaagctcaaatctgtttgtttctgaagcaccgggcttccctgtgcacagtggccaaagctccttgttctttgtttattaggatggttgaggaccggcttgccttaaaataactaacgttttgctggtgggctattagatttgctcctaccactgtgctttgaaagggagtttatctgaaagcagcaatggccacgaccgcccgccccccgcccccccccccgccgtccaccgatgtgtttcagaagcacagtcacagagctactcccgaacaaatgtcaaataaatgtagactgtggttgccaggaagacagccttggaacggtgctcgttctgtgcccacagggcagcccagtgcatgctttggctgtggggtgagcaggacccatgaaggctgcaaggaatgacacggggggagggcgctccaggcctctgcaattcttcggagatttcagctgcccccggaggatcctcctcccaacagccagatgcctgacgtggaattagctccagaaatggttgcaattcccctgatagggagagaaattttctctagagtgctcgactcactctaaaggggcctcttcagcaattcgtaaacctacgctcctgagggggaaagaaactgcaactgccatggcaacggtgatctagtgcttgttccacagaatgcggacctcacagggccaccgcaaagcagcccagattctattcatatgttagaaagcaggaaaggaggcagggagaagagagcaaaggcaggataacagcatcgtttgtgtgggcgaaatgctctccacactttataccagatcgtccctgccagggtcctactgctccattttacagagaagaaaactgaggcacgggaaggctaaggggtgtatccagtgtccccagcaggtaagagctggattcagaccccagggctggctggcacagccaccccgcagacctctctgtgcacctgcacctaagtcggctccactcactccatgcctttgccacctccagtggcttctgtcatgcctagaacagaaccccaatccggagaaaactgacccactgtggtccctggctgcttctttccaccatctccctgcccagcacccgctgcctctggccttcccttccagagtctcctcctcgttcacttgactcacctctctgctcaaatgtcatctccacgatgcgtgcccggaccacaatatctaaaccagcagctccaggaattctctatcccctttctcagctttgtttttttcctttagagctcttatctctgccctgacattagacatctatcaattgtttatggtctatctccccaccaaaatataagtcccaggttggtagagctctgcttgtcttatttactgatggagctttttgcacacctcttttggagatagcatttgtcatgtcctgcggctgtgcagggttgggtggccgggggctagggtattttctctcatttacatacctccctcctctgtctgccagtaaactcctcggagctaaggcccagctgcatgtagccccaactcctgctcccgactcccagcttcggagccaatgcctcaccctgatccagactcactgaaggtttttgctattgtctgaatttgggtggggcccaggggctggaagacccctcattcagcttggccttggtggaatcctggccaggcacaggtcgtctcctcctcatgcttcctcgccttggcaaatccttgagatttccccgtctcccaccttatgtaatttttcagtagacacttcttcgaaacactgcagcctctcctggtctaaactggtccagaacagtgttttccctcatttaagaacatcaaggtggtggtgagaatgggccggcccccgaggactggggcatccaggactgaactccagagtgccctgtcccaccctgagcataccagagaaggggaaggcacacgactgtgcaggccgcaggttggacagtgcttagaaagcaaatccaaagggaatgagagaacagaagaagagaaaggaaatggtccctcaaggctggggatcttgacaacagccattcccaggcagctgcaacctcagagagggacccttctgaggggaggcgcttgcagctgggccaccggagaccacgtccaggtgaaggcactgggtattcctcactccaccgggctctcagatccaaattactcaaatgagaaaatgccagcaagggctccactgctaagaaaaataaaggaacagaattttcctacctgttaagaacttggttttcttttttttttttttaaacagagtcttaccctgttgcccaggctggagtgcaatggtgcgatctcaggccactgcagcctctgcctcccaggttcaagcaattctcctgcctcagcctcccatgtagctgtgattataggcgcgcaccaccatgtccagctaatttttgtatttttagtagaggcagggtttcaccatgttggccaggctggtctcgaactcctgacctcaggtggtccacccaccttggcctcccaaagtgctgggattacaggcgtgagccactgtgcccaataaagaattcagttttctataatcctgcaatctgcgaaatattatcttacacacgcttggggaggggtgctttgggtctgtttgcttgtgttttcagaaagcaatagaagaagcgggctggcaggagccctgtgctctccctgcaagaaagggtcagagaccccctctgacctgagcaaacacctggtgtttcagacaggtaggagtgagagggcctccagcaggcggcttcctgctcatgggagcaggtggtccttaagaaattaatcggaggccaagcgtggtggctcacgcctgtaatcccagcactttgagaggctgagacgcgcagatcacgaggtcgggagttgaagaccagcctggccaacatggtgaaaacccatctctactaaaaacacaaaaattagctggtcatggtggcatgtgcctgtaatcccagctactccagaggatgaggcaggagaattgcttgaaccgggacctgggacgtggaggttgcagtgagctgagatcttgccgctctactccagcctgggctacagagccagactgtctcgaaaaaaataaaagaaaaagaaaaaagaaagaaattaatcggataaagcgtggccacagtttctttcactaaaataaatacaaactcttgcacctaaaactagcattcattcagtccatttctaaaggaatgtgacaggcactgcacaagtcactcaaaataaacaggacgcagccctctgtacacagcttgctactgagtgggaatgacaggacctatggatctacgctgttagggacgatggagctcaggtctgaggacagttaggattccaagtcctatttctggaaatgacatcatcagtttgcagtttcttgcacttttgatggctgactcaatttggagtcaggcctgagcagaggggtcatttggcttcttggatcagccttgaccctcacttataatctgcagctgctcacacggtcaccttgggaagctcccggaggcgagggatgctaaaaagagactcagacgcccaccactctcccagggccggcctgagaggtccacacagaaaggcccctgccttttgggttggcttctcacaggaggtcatttcccaccaaggaactttctgcggctggaggaaatgagattcttacagaaacaccagctggctggcgagctgaaagtgcctgtggggggctaagaatcaacctccaggctactgtggccgaagcattcgggcccccagctcgccccagcctggcctgcttggaccctcctccagttctctaagcatcgttcctcggtcttcccacaaaaaacgcagccctataaaccacaacgagctcgagaggtggggttcacttgcaccaaagggccccaaagccccacctagggtgcctgtcagtcacactcagacactggctcataaggagtgggctggcccagagaacagcccaggtcactggaaggaagtgtgaattgaaaaccagtcagcgatccagaaattggaatgagatagaaggtgggagatgagttgcaggtgggccacgctcctcatgaagagagttaagcatctttaggcctagctgcgcaaaggggatggggagggctcccaccttagagaccatcctgacacgcaaagcactctggcccaggtggccgtgctgatggcaaaacctcgtgaccaaaacaaggttatcttcccagctgcgctatccccagctcatgccgagaaggtcacgtgctacagcagagccccgtaactgcctttggggcacgtggcctccgtgtgtgcatctggggacccagctccagtggacataggcgacaagagagtcacaggcccgtggctggggacagaggcctcctggggtttgcaggaggcagcacctctccagttcagaaaagccattttagcccaagggggtggggggtgcagagttggcttttcgtattgtttttaatgttaatgaagtcagaggcagacgagctttgtacagaaggagcaaggttgcacaaagtcactcgctgatggaacactggccgtccactcagctccaagtgtggggcctgcctctgccagagaggcccccaggagcctccctcggtccttgccctcagcaagtttattatagagtgggcaggaccagcactgttgcagcgcacagggtgggagccttggggacagccgcatggcagcctcccaggaggccccgggctgagggatttgcagcacgctcccatcctcccagttaatcctcagctttcgggttgctcgttgtcatcctcatttgataaatgaaaaatctgcggcttggggaggagacacaggttgtccagggtcacacagcaggcaccaccgaggcgtgctgggggtctcagggacccggggaggagctcctgggtctgctccagggatccagggattcaaggaagatgtgaccgtgtagatgacaccgtaacaaatcttaaagaataaggtgaccaaggggaggagaaatggagggacattcttctccaatgagacaatgtgcaaagtcaggaaagtgacaccagagaatctggtgccttcaggagtggggacaaaggctacagggaccagacaacagaggcaggcgtgccacccacccaggggtcctgaaaaagcctgggcatgccaccctgggggctccacaggaagcctgggcaggccaccctgtgggggaccatgggaagtccaggcagaccaccccagaggccatgagaagcccacatgtgccaccctgggaggccatgggaagcccacatgtgccaccctgggaggctagtctctaatgaggccaagcagggacatgacagggacggataagcaggagagaaagatccctggggaagtgcacgaggaaaggacggagggggaaggggaagctggagacctggaggccaccaaaatgcaccgagagaaggcaaggtggccctgacccatctgcttcccacagaggcacttgctgtccactagcgggggtcagggcaaccagcaagcaccccctcgtgaagcgccacgactcgacatcgcaaccgcaaaatgataagtacttgctcagccccagaaggccacggcaccactttgcgtctacaaggatctgttctttcctatccagccacttctgagaaagtgggagggtactgctttgtcctggctaattttctgtcactttcactccccctttctctgagtttatggcaaaaataacctcaccgctcaaattttttggaaataaaaaatttttaaaaagcctagaatcccaccactctaaacacttcatatcccaaatcatttcaactctgctggatttcacaaagcctgatgctggcgtgcaagctcagtggggcggggcggctctgtgcgcgggtggatggccaggcctgcaggtggcatgcactcaacaagtgggccgtgggtgcacatggacaggcggccagcgtgcaaatgcccctgccgtctctgcagtcaccagacgtggcagaagcctctccctcggcctctgtcccctcgtcatagtcaccgtcctcaatgctcccctctgtaagcatgccagtttcctttcccaacctggggaaatctaggtcacttctttcttacttttttcattttaattttctattataaatgatgcctcctttctgggctgatgagaaacccagaatacctacaggaaaagtggcacagttttgattacttacatgaggaaagttaaaagacaagccacagacttggagaaaatagttgcaaaatacataacagccaatgggttactatcctttacatagacggcgcttgtaaaaatcaataagaagaagatgttaaaatggaaaaaagggcaaagaatatgaattcactggcaagacacaagcaggtagtagacacaagcaacatcttgtctcgcttataaacacagaaatgaaaatcaaaacaagatccttccctccctacactggaaaaaataaacaagactaagtctctcttactttgttgaaagtgtggtgaaaggatcctctcgtgttatgatgatgggagtataataaattggtataaccaattcagagggcaatttggcaaaataatgtaaatatgcttttactagcacacaaaggtgtaaaaaacacacttttggccaggcgcagtggctcacgcttgtaatcccagcactttgggaggcccaggcaggaggatcacctgaggtcaagagttcaagaccagcctgaccaacatggtgaaaccccgtccctactaaaaatacataaattaactgggcatggtggcagatgcctgtaatcccagctactcggggaggctgagccaggagaatcacttgaacccaggaagtgaaggttgcagtgagccgagatggccccattgcactcaagcctgagcaacagagcgagactccatctcaaaaacaaaaaaacacttttacccataaatcttacttccaaaaatcaattctgaagaatagcaacacaaccaacaaaggatatggatatgggtgttcgttcacactgtttacaacaacaacatattgggaaaatccaaacgcccatcacacgaggagctggccaggagtcggaagcacacaggcatcaggggcctgctggtccatggtgagaaggggtgggtctccattttctttttgtttttgtttttgtttttttttttgaggtggaatttcactcttgtcgcccaggctggagtgcaatggcacgatctcggctcactgcaacctccacctcccaggttcaagtgattctcctacctcagcctcccgagtagctgggactacagggacgcgccaccacgcccagctaatttttgtatttttagtagagatgtagtttcgccatgttggccaggatggtctcaatctcttgaccttgtgatctgccctcctcggcctcccaaagtgctgggattacaggcatgagccactgtgcccggcctccattttctctactagaagagggactttgccttttctaccacattgtttgaaatatttacaactagtaataattttgcaattaccaagaccataaaaagaaacaggtggagggtatataaatcaaatactactacaacagacacggaagtgagatctttgtgccagtgtcttctccttttgcacaaaagtcaagggcagaccatctgcccgtctatttattgatcccatcttgtcggtctcccccagagaatgccagcctcttcaggtcaaagggcaccccctttctctgattcttggtgcatcccgcccagtggttatcctgaagagctcgtcgtggcaggttcattatacacgtacaagacaggctgattcctcttggtgttcaatggtgcacctttcggaaggtaaagtgccttacctctgcctgtctgatttattttaactctctcccataaggtttccagggtccagagggctccaattccgtttcacaagccctgcccagtgcctggtctacagcaagcaggcgctgaatacattttgcttgtttgatgaactgatttttccccaaccccctgcaccacccccagctcggaagaggtggtggaggaagtgactggagtcttttcagaatagtcacgagaaatgctggttagacccaagagagaacaggcagatgatgcccacgggcaatggttcagtagctgccactgaccatggctctgacccgccaggccaggacggctagagcacatgctgggagctgctggccgtggcaggacacgctgcctggacaccttcttttgcctttgggaaccccctttagactttcccggggtgctcggactttccttcccagtattccaatctcgtgggaaggtgatcactcttcaaggataggccagacccttctcttctcctcatgtgccttcgcttgtccctttcttgctggagacggtgagctggccagggacctgggaaccagcaaccagctcctcactccgcagtcttggcccttcttccggactcagctcctccaatcttcaatttggctctgatgccctaatttgaaactctcctttggtgtgatctttttgggaattaaagagggagctctgcatacaggaatgagcctgtgtgcaccctggaaggtaccagaagaaagtgcagtctgggcagagagtggaggcagaggctggacccactcggctcttgggagcgcgggggcttggtacctccagaatctcctccatctccagcctccttccctgtgacacacgggcagaatctcacactctgtctgaagtttccagacagttggaaacgtcgctcatgcatatatgaactcagtcaccacgttccccaaagacccaaggcctgagctgaggaggcattcgaccccagccagcgtccccagcctcgtccccccaagggtccccagcctcatccccacccaaggtccccagcctcaaccccacccagggtccccagcctcgaccccagccagggtctccagcctcgtccccacccagggtccccagcctcgaccccacccagggtggccagcctcgaccctacccagggtccccagcctcatccccacccaggctccccagcctcgaccccacccggggtccccagcctggcctgcggcctgcctggcagaggcaggaggttcccttcgtttttatcttgattctgaggaacgaacattggctgcattcccgacagccgggccaggagcagggatgtaggtttaggataccaggagaccctggggctgatgtggggggcacagagcaggcgccacttctggaaccttccccaccaaggctgttcaggaccaacgagcatgactgcaggcagagccaggggaaggaaggcagagaataggcataatgcccacctaggaaataggcacaaatgaagaccccacaacctccaacttggatgcggagtcaaccattcctcactacctgcactggtgaggtctgtgtgtccacctggccagcccgggatgcccaatagctggggatgcgctgtttctgggggagtctgtgaggtgcctctggctgagaccagcgtttgcagtggtggactgtggcgagcagatgcctccctgtgtgcatgggatcatgcaaccccttgaagggctgaagagaacaagaaggcagaggaaggaggaacttgcctctttcctcccacctgcctgcttgggctgggacactggccttctcctgccctgggactgggtccccaccatcagctcccgggtgctgccctcaggcttgcactggagccacaccaccagctttcccggggctccggcttgcaggcggtagctggcaggacttctcagcctccgtcctcatgtgagccaactcctcactattggtctgcttctctgaaggaccccaactcatgggtccacctgaccgtggtccaagtcccatcacactttgcaaagctgactgcagctgctgctcactggcctccctgcctggccccttccatgcaccctcctccagcatccaagaggatcctgtgaaaacccacgtcagaccatggccctctgcaccgcctcctgcaaggcatgcagtggaggaagagtgacctcaagtcactcgtgtgaccacgcggggttgcccccgtcacctctctgacctcacagcccactacggtcccccacagcccactccctccctccgctctggccacgtggcctcctgcataaggctgcttctgtgccagaacgtccttccctctgacacacacaggctccttgctcctaacacctgtaagatccctcctcctatgtgaccttttgcctggccactttctctaaaattccaactccctcacactgcacattccctcacactgcacattctatatccccttccccgcaggatttttcttttttagagatggggtctcactatggatttttcttctttgccttaatttttatccaacaccctacacattctatttatttataccatcgtgtctgtcttccccagagaatgccagcttcttcaggccagggatctctgcttattctgttcactactgaattcccagtgcccagaacagcacccaacacgcagtaatgagattgttgacgaatggaagaccgcactgctccatggggatctgggagaggaaagggttcctctctaggcagctgctgaggcctcatcgatccagtatctacacaggggtccagtccagctcctaaaagtgcaaagtaattatagatgcgattattctcctgagcacagaatcagccaggcagtgtgaggggccagcctgcactggtgctggacgcacacagagtctcagagccacaccctccaccctcctggggaactgccctgcagaaccaccccccatgggcgggcactcgtccttctggggctcttggaggaaatggttacagaagactaggccagatgacaataagggatggagaataactaagtgccaagccaatgagccatctgctggtaagaactccatgccaggcagcacaggcggtcccaacagcacgatctctggattagcccaaatagcatcggaacatttgacaacaaattgaactactagtaatagtgctcacttcaatgagccggggacacagtatccccatggcgagtcagctggcccgctgtaaccacccagctgggtctccccaccccaaaggcctccaggctgtccccttctcatcctgtcacttgaaaagcacaactcatggtgccaaagctctgacacggactccactggagctgtgggcagggggtgccaaggtaccgagttccaagccgttgttatttgagagcgtgccccccgccatgagagcaggtggggggacataaagtgacacaggatggactggccaaaggctgaggacgatcacttacctcacaggatgatgccacccccacggacaggcaaggagctctcaccttccccaggaccccagctgccaccagagctccagatggccctgggggtgtctgtaaagcctgtgaccgtccaccaggtggagaccaggctggccaggggagggagaggaagtgaccactggccctggcactggctggccggctccagcaggcccgaaggggagggaggagcctgggtgcaccagactctctcaataagcagcacccagacacttaacagatggaaagcggtggcttggaactcacttccaacgaaacaatagcacatgctccggctggctttgacacttgcttccaaaggcgacctgcacccagggccaggaccacggcatctgagcctcctcccccagccgccaaccccattcccaatggaggagcccaggagaactgggggcggccaaggcagcccttccctgctccgcagatccagaggatgcccacagcccccttcccctcccgcctttcccacactccctgtagcaattcacacaagcggggaggggacgaaactgctgaatccagcagatagcttgtggcggggtaatcctcggtccggccccatacaggacagaaataaaatcgccatttcagctccgggcgcagctggaggaggctgacgccccctagttaggggaaggctgtgggtgaccgagaaggaacttttcccgttttctattcaaatgaaatgagggtggcggtcgcagcagggagagaggagcgaggggagttttcccggcggggctggggggtccacagcggcgcggccacgctcagcccagcgctggcttaggagggacgggctgcgtggggaggcgacggctccgggccgaaggggtcgctcagggctctgcacagctgtccagggggcatcgggagataggcagccgaccgggggctggagtcaagggaagaagaaagagggggaagggaggtgcagggagtgaagaggaggggagagaggagagacgggggagggaggggggaggggggagggggaggggcgggcgggcggccgggaggaggagcgcgcgagccggagtcggagcccgagcccgagcgcgagccgagcggaggagaccctgcggcgcgcggcggcggctcccgggcgtcccgggcccggtggcggcgcggctgtggttggctgagcgccgcgggccgccccccgcccgccccctcccctgctcccctcccccgcctcccgcggcggctggcgtcgggaaagtacagtaaaaagtccgagtgcagccgccgggcgcaggatgggatccggctcctccagctaccggcccaaggccatctacctggacatcgatggacgcattcagaaggtagcccctcccccacccagacaccccctcctccccccgggtgacagcgccggggccgggcgcggcggggcgggactgtccgtgcgtctgccggtccaggctgcggcctccgtgcgctccgccagctctggtcgggggcgggggtccccacgcgccggctccccggggaaaggggcgactcgccctggggggtggggggtgggggggcgggctagtgtttccgtttcacaggcagagcttttctttttgaaaatctgattaggctgagtttttacattcaagggctggcacatgaagcctttaatttccggtggatcggcccgccgggcagccccggggtcgtggtccgcggagggggcgagcagccgccgcttcctgtcgcgcgggggcaggtgcggggggcgccggcggggacactgctcccccgcaggtgagtagctccgactgcagagggggactcgggccgctgcacctccggggccccgcggagagcctggggggcagcgggtccggctctcccctgctgtgcggagataggaagtccctcgaatgtccagcgttcctagcggacttgagttacacgggagaggggttcagaatagaccccctttgttcgtggccccctctgacgggcagggagggacaatgagcgcgccggcttggaaggggctctcatgagctccccctaaagtccccagggaaaagccattgtgaggaaatccctcaaacctcagctgggcgtttcaggaagcccttgcagctgcttctcacctttctgcccacggagtactccactgaaggaggccagggagagatgccccagccaggcacagagcaggtgccggccaggcttgagtctttcctgttcccagaggtgcatttggccagtttaatcagtagatttaagccaacaagcctccctcaccctgtgcccggcttgatccccgtgaaatggaaagtacagccctctcccaccgtagcccgctttgagagactcagataaccgggaggaggaagcatcttcaaggacaggtggtcacccccttatttaatcagtgctgggcagctgggcagctgggcagcggcagacgcacaactagacccaggtccctgactccaggactaggcgtctgcaattgcatgggactgtaacagcctcctttctccccaaaggaaggagtggccctcccttgaatatgtcactgcaccagcatgcacactcacacacacacacacatgctccaatgctcacacatccactcacaaacacacacacgcacacacgtgcatacacacacgtgcacatgagcacacagacatgcacaccacataggcacatgcacacacactttttctgcccgatagatgagaatgtatcaaagacctgcctttaaaagcaaaagtctttttaaagtgagttgtcaccagatcaacagtagcaggtccgtcctaagaacttcctaaagatgtcccgggagcagctctcttggaagcaggtgaaaagtggaggagagcttcaggaggggtgggaggaggacgctgggcatggcaggccaggctgttattgtgggcagggtagcttttcacagtggacacgctgaggttggggtgatctccagaaaagcagcctgcaggtgggccctggggaagacatggcatgtggcacctttgcgggggagaggcggattgactgccagctctaccacttcctgtaccacgagcaagcccctgggctccccaagctggcatccccgtccataaagaagggataataaaatctgctttatagactggaatgagaagggaatgagtgaatgtaaacactgcctggaacactgcagaacacgatgagcattattcttccctcagttccttccataaacgtccttttgtggtgcaaacagggaggcgccagacgggtctccaacccccaccccgccccccatctccacgaggtctgttgcttgctcctgagctgcccccgccctctgccccttgctgtgaaccccgttggaagctcctagctggactgtgagtcctggttgaagctgaatcgtttgcccaagccatgtgccgggcaaagcatgataacttctcgctcacctcccaggctgcacacccagcagtgctgtcacggatgggttgcaccgggctcagctgagagcactttcagtgccgctgccatcagccgccattccttctcttaaagtaccaggcactgggtaaatcctggaatttccagcgtgaatctgtctccctgccatccgccccatctcctctccatcaaaggtcatggaaacaaacccatgttgcttcctaggagggagccctgggggtcactgggtgcaggagataagggatgtgttgctttccgtcactgtgttcgtcggcaccacctggccatgagtcctggcgatgggcacacccgccccttcgttatctctgctctttgtccctctggttacctgacccctggccatctcagtttccccctgagaccgcagagacggggaggaaggagggaacattagaaactgggggttctgccgagttctgtgctccggcaaagctccaggttgacaatctgaagttgtctgagggaggccccgggcagcaagtgccggtgtctcctggcttggccttacctgtgcaggtaaccctgcagacatgcccagtgattcagaggagccgctgcagccacttggcgccaggccaatgctttatttatatgaagaaaactccagacacgcacaggtgtcacatcaccagagtgacacagtgggagtcagcaacaggaatttgggggattgtcttccctcctcaggagcttttccttcagaggttgtgcagaggaagctgggcgtgtgaagtgagtcggaggttgcctcctgagccctacacgaaggcaggactctgtgccctggagtccaactgaggctccgttttcagtgctcccctctcatctcgagaaccttgggtcagttacttcactctgtgcccctgtgctgctgtgctaataattaaatgggataaggcagattgcctggtcaatgagcccgccgtgtttattgagcatctactatgtgctgagtgctggggtccatgggaagctgagtgctggcggaatgggaaggcaactacaaatgataaacagcagcagacgttgcaggctgggtgggccagccccgtgtggggcctgatgaacaggtttttttccctgacgatcggctttgcaggctttgtgggctttgtggggaaggagccctttgtgcagaactggtagccatgaggatggcctggtgagaagctgctgaagggctggggacagcctccacccagccagcagcatctgcaccggcctgttcccgtcatctgttccttggcttgccagggtgcacagatcaggacttggcacttccccagcaccaggtgaagccctcctgtcacccccaaccccgtgtctagaccctcaggtgggctgttaaagaaggggagaggtggaagccaggtccccaaacctagggtgctgaggtccttgcttcagagagactgtgtcctctaggagctgaagcgcttcgtctttccccagaggattcgttttttcctttcctcagctgcccctaccctggggggccctggctgcagcacctgctcctttctcttgcctatggagaaagggtttgctcagctgagctgcccatggagtgacagggacgacgcactcagcactggggagctggagggggtcccacctggtggcacatccaggcttgggtttgccaatcttccgaatcggggaagagagaggcctttgggacccctgggccaggctgtgggctcgggtgtggtgaggagccacatctgggcaagactgaatgctccggggcctctgtggtgccactgccctgacctggcggccccctcgggacactcgcactgtgcgcggcctccctggcgcctctgggctgtggtgttctggtcttggccttgctctgcagctggaacccaggtctgaacacatcggtggccgcttgagtttgcggggctgtttctactgtaaaccagagcagtgaatgcgcacagcccaaagggaggagccgcgctagaaagtgttcaagcgtccgcagaagtcggctcccagttcttaatagtttgccacccaccgtggctacgccacacctacgcttgcctccacccgacctatgcctgcccccttcacatgcgggagcccagggctccgtgccctgggcagctggtggggtctgcccaggccttctcgtgatgcttccacccagcctggtcctggcacccaaggccaacctctgcgggccccagagctgtgcctttttggctcaggtcctccccgcagtgcttggagtccaggcctctgcaccctgctggggtggtctgtggtcctggcccaagggaatgtcgctccctgctgcctggttctactgatctgtcctgttcaggcccctctgccttcatttcttgctttggcacaagcatgagctgctgtttcccccagctcctcaggggagaggagtgcactgccccaaccttgtctggtgtggttagcatggtggggccttaagccctacccggctcctgcgtgcctttcccctctcctgcccacgacatggtcaaatgcaaacctcctttcattttagaaggcatgggctgctcagcccacacgcgcagtgccctttcctgtggctgcaggcatctctgctcaattgtgcagggctgcgtcccccggccacactgactcctctccaggtttctcggctccagcaccactgtctgcgccctccttcccaggtggacggcggctctcctcgccatcctctccacttccagcctatcatctgtctgcctgttacatgtttgtaacttttgacctttaaattggtataaaaatggtactgtaagttcactgaaccaagaaaatctgctgaaggaagggggtcagtcacacccttttggggtttccagtgtatgaatggagggggtggcggtggtggagggacagggagcaatgagagttgccagccttattgctgtcctgacccctggctggggacgactcccctgtctccacctgaattgaagctgggctgtgaaaagtagtaagaaccctcggtttttggttcctttttcaaccagcaatcagccatgaagtgcctgaccacttgagagctacagcaggtgctgtctcggagagggcacaggaaactgggcccttcccaattttagcccaagggtgccgaaaagtcagggagctgctggcctccacactccttcccattggtgtggtccgaattcccctttagccagacatttccaatgtccagaggcccaggaggggacagctggaagccagaagcccacctgacgccatcaggaatttccatgaatgacctggaaacctctcagactaaaccaatgccgcccaatctgggaatccaggagggctggtcccatagagtggtggggacatggtgctgagacggacagcctcgcctcatccgcctttcccacttgccagccgggaggcctgggcaaaatcactttctccccagggaagtggaggctcactgtgcagtccacgcggagcaatggggtgaagtttccagagcagggcagggcatgtggggaggctcaggaatgccacccttgccctcaggcctgggcacagcatagcccccatgacgcttctctcatcctggacccatcagcccggaagactctggaagcagcagtggcagcaccttcctgtcacttgtcttgtcactccccgagtccactgtgagctagaaccacaggctcccatgaagaaggagccagaaccacaggccccatgagcccaggtcccacagcccgcaccttcgtcttccagccagcctctccggagctcagtgtgggtggaggggctgtctggcctcagaaatgggcaaaagacagctctcgttgtcagcgaggtaaatctagcgcagaggaagggcacactgtccccgtcagacgcctcagatgaactgacatgcaaatgagagatgaaacggggacgagccgggcagctgatctcagtgcagcaactgggacacctcggggcataagccgggcagggaggcggcaggaactgggccccagggggccaagacttcctgagaggctgggcccggtagcccagtcctgggcttgcttcccagggggtggtgggcaaccctgaaccctctctcacccaatcacctgctcccctgggtgcaggtgacccagcaagccgcactcctgggaaatttcagaaggttttgggcaagaagggcccagagagcccccagagaccagacggcacagcccgatagctgggcctgccccagacaaagcgtgtctgcactccttggctttctccccagacaaacccaccctgagctcaggatccctccagcttccaggagcaggtgcggggcctgcagggacggctcgcagagaaggcagtttgcgagtcagtgcctggcttgtggaggttgagaccaaggccagttgggtgcttgcatttccaggggtccaaatatttttgagaagaaaatgttctaagaaagtgcacagggtggtggatgaaagaccacgctctgggtaccgtgtacaccgctcgggtgacagtgcaccagaatctcagaaatcaccactaaagaacttacccatgtaaccaaacaccaccccttccccaaacactattggaattaaaaaaaaaaaaaaagattaaaatggttaaaaatagaaagtgcacaagcaagggtccatctgcaggagttggaggagcgcatgcctgtattcctggcactgcgggcacagtcatgccatgggcaccagggacgcccagtgcactcagccacccaggggtggctcccaacattttcaagctcaaaaagaaatattttcacttgagggtgcaacttatttgtcttgaacccatccctgactgcctgtctcccccctcaccctgaccacatctccccaaatcccgaagctggtcacgcaacgggagcattggccctgaacagaaacccgcagtacccctgaaaactcggtctagaaacaactaaaagaagaaccacagcattttattccgtttgctttagattctctgccaatttttttttttttttgagatggagtctcgctctgtcgcccaggctagagtgcagtggcgtgatctcggctcactgcaacctccgcctcccaggttcaaggaattctcctgcctcagcctccggagtagctgggactacaggcgcctgccaccaggcccggctaattttttatttttagtagagacggggtttcagcaccttgaccaggctggtctcgaactcctgaccatgtgatccgcccgcctcagcctcccaaagtgctgggattataggcgtgagccaccacgcccagccttttttttttttttaattttaaattgtggtaaaatatatgaacaataaaccctccctccccatccccctcccccagcccctgacccccactgtacattccgctttctatctccatgaaactgctgagtgcggggacctcacagaagtggaatcacacaggatcgccctgctgtgcctggcctccttcactcggatcatgccctcaggtgcatccatgttgtagcacgtgtccgaatttcctgcctttttaaggccgagcggtattccattgtgtgcgtggaccacattttgtgtttccattcaaaacggatgaatcgatgaaactgcctgatatttttaaagcctcagtcattttcattcttagttcttcagtttgcaaagggccggcctgttgtgatgggtttattgttgcatcttctgaaaaactttgtgagttcccgaaggcctctccacgtcttgagtcatggctgtgctgctttgcgaagctgtgtgcatgtctgtggtgtagcctgtgtacagcctgtgatgcgtcgcagcggaagggtagggggctgcccagggaagacagatgcgccaggttccgctccacggagctcagctaccagccctggtggagagcgcagatggggccgatttgtcatttgtctgcgcttgagcccagcagctgtgtggcctccctggggcaagtcattcaccctctctgtgcctcagtgtctctgtgaagtggggggaagtttttggaagattaagtgggctaatacgcgtcaaatgctagaacacactggcacttggtaaatgctatataagtgttatcatttttgtttgtttattatttatttatccatgtcatggatttaaggcagtctaatctcagtgcctggtggagacccgggcgccacccccccaggttgtcaagtggtccctgtgcctcccactatcgtccccagcacggtgccgtgtccgggcgtgcgtgaagggccagctcacctcacagctctgcttcccaggttagctcccatccaccctccccctacctgtttcctcaccgaaggaaggggcagaaagatgccctccatgccccttccgactgttgcagagggatggaggactatggtacatacacacatatacacgcacacacccaccacacacacacaccatgcacatgcacatcacacacacgcacacaccatgcacacacaccacacacgtacacaccatgcacatcacacacaagcacaccacacacaccaagcacacgcacatcatacacatgcacacacaccacacacaccacacaccacacacacgcacatcccacaccatgcacacacacaccacgcacacgcactgcacacacatgcacacaccatgcacacgcacatcacacacttgtacacaccaggcacatcacacacaagaacgcacaccacacacaaggacacacaccacacacacacaccaagcacacacacaccacacacacgcacacacacgcacacacccaccacacaccacacacatgcacatcacacacgtacacaccacacacagcacacacaaaaacacaccacacacaccatgcacatgcacatcacacacatgcacaccacgcacacgcacatcacatgcacacgccacgcgcctcacacacaagaacacacaccacacacacgcacaccacacacacgcacatatcacacacatgcacatcacatacatgcacacaccacacttacacacatgcacatcacacacaagaatgcacaccacatacacgcacatcacacacatgcacacaccacacatgcacatcacacacctgcatatacatcacacacacatcacacacatccacatgcaccacacccaccacacacatgcacgcacctaccacacatgcatatcacacacatgcacacacaccacacacaagcacatcacaaacaccacacaggcacatcacacacatacatacacaccgcgcacacatcacacacatgcacacacaccacacacgcacagtatgaagatgacagagaagtcagcagagcccctgggggtttcaggagttgagtggggacgaggcaggtggccacacagctcggagggagggcagaaggcacccgtcttcgcagagtcacagtggggcttgcctcctatacgtgccggaagggtgaagccccttatctcattgcccgatgtgatgaggtttgaagtggttgagcttggagggtatgggctgagcccacagcagacaggcctggcagtgccccccgtcttcccaccctgcggtcatgcagcccgactcttgggggcggggtgccaccgtgatgtgccgtcacttgcagcagtatgtcctcatgccaggctgagaccagcactgtgtgaccagcctgccccatgtccctcagcgctgtgtcacactccacactgaggccccactgaagcatgccaggccccatcctatttcttccaggtagtcgtctgcccagcacctcccctcccaggccttgccctaaagcccaggcctctcagcatccaggactctggaatctcccaggtgttgatggctgaggtcatcagctggatgccaggacacccaggatgctccaggtccttgctggggtctggagtttgtgattcagcctcagtccctgtggtgagtccaccatgtgtcctcagacaatggatcagagagcccccagaggacggcccggggccgagtcgggtccagatgccaaaggggcttctcgaggcatctccagctcccacctgcccctcggagtgccaggcttggcttctggaagagaaagctgggggtttagtgactccagccaactgctgtgagcccaaggcatcaaactaaaaatagcgaggccaagagggagtctttgtgttcggctcagtgggcaatggtgcctcacctcgcagcatgacacagggctgatgacacggggcacgttggtcacaaagtgccagtctcagcctggcacagggacgtgccacctgcaggtgatgacacatcacagtggcagccgctcctgatggtgctgctgcattgagtaggagcccagatccagggagacagttgcagcagatgaggcaggaggccagcgaggggttctacctgctttccgggctggcctctgcatggacacaaagcagaaagggcataaaggtgaccctggccaccaaagcagacctggagcaaactggaccagcgcaaggccccggtgccagcactcagagacatttcttttctggcaggaaatttgtgcttcattttctaatgaaattccaaggcaatcaaaaggcaaggaaagaggagggaaaggaagggagggagggagggggttccattcccatccgaatggaagcccccaaggcttctgtagctccccccatcaccaacttcactcaccactcttatctgatgcctcctatttgggtacacacggccgggtcggccttgcgagagactcagtttcctctcgacttccgcccgcctgcactgtcaccacgtcctgccattgacctctgttcatccactcatggtcactgctgtgagttgaattgtgtctcccaaaaaagtggatttctgtgctaacctgtgaatgtcccgttagttggaaatagggtatttgcagacataatcacatcaagatgaggtcatactgcattgggatgggcctcaagcccatatgcccgccatccttctaaggagagggaaaggcagacacacatttgtccatggaaatgagaacggaagacgtagagacagaatcaggccatgtaaagacagactcagagaccagagtgatgcatgtacaagccaggctctgcgggcagcccctagaagctggaagaggcaagcctcctccctggagtcctgggaaggagccagccccgcccatgcctcgagctcaggcttcaggcctccggagccaagagagataaacctctgtggtttcatgtcacccagtttgtggtctttgttatagcagccccaggacactcagggggttgccttgtccacccccatcctggccctctgagggactggttggctcttagaagaccgttcaacctgccctctggtcctcctcccccacccagagacccctggctacaccctgcccaagggagctcaccaaagcccacagggtccctgtgatcttgtcacctgggctcccacaggccagcagtgttggaacctggacatctggctccagccttggtggccacccccgaccttgctctgctcctacagctcccggccttccctgccctggccggcccttgctgaatgtccccgctcctaggaagccggatgtgtcgcgtgcaggtgcctctctgcactgtaataactcctcaccaggcacccttggagcccaggatcaagtcactcaccttccaaccctgcccctgcccagagactggcacgagaaccagtaacagttgttgaataatgaacaatggatgcatgcagctcacccgtgagagggcgttgctcggctgggccagggatgaagcttctcccgcgtggctccaccgtctatccctcaagctcctgatgctcccctgggcacctctgcgccatgaggccccgttgaagtcagttggggaggcagtgtggaccgtgagaagggagtcctaagcacaggaaacgctgccttcctggggccctaaagaacaggctcaccttccccaagggccttcaggccctgacatctaaaaagatgttctttatcaaaggggaaagcagccctggggtgggggcgtggccaccagtgcagtgggcgtggccacaaccgagagggcgtggtcattcgtgcagtgggcgtggtcatcaagaaagggcgtggctgcagccggaagggcgtggctatcagctccagaaggcccttcttgctgtccttggacttgggttctccttgtcgacgaggatctcagctggagctgccaggggcagggctggcaccaaagcacttctgaagtctccccgcctcccaagtgtgaggctgtggggaaggagggagggcagctggcttgtttctggatgagcccatctgactcagcagctgggacccagcaggagcgcagagcaggtcctgaaggtgccgaggccccacccgcagctccgtctcagctttgtgagggctgcactcccccgtgtgcatccggcgtcacaaaggaccacaggcccggcggcctccacagcagacaccaaggccctcgcggtctgaaggccgaattcccaggtcaggctgcagcagggctggttcctgaggcctctcctgggctggcacctcctccccgtgtccatgcagggccgagcctctgcatgtctgtgtcctcggcgcctcgttttacaaggacatctcattttaaaggcccggtctccaaataaggtcatatcgtgaagtgctggggtcagaactacagcatgaattttgacgggacacagttcagtccatagcacccgctttgggaagtgggaatgacctctcccttccccatcttctggcctttgtaaccctaatgtgggaaagcaggagggatccagaacgacattgggtcaccaaagagagcatcgcagcccaaaaggttgaaaggcggcaccaaggtcccgcgcctggtgaccgccgactcgccctcccgggctccaggctgtccccactcccccccgccccaaccccagcatgttgaggcgcctggtcccaactgcccattcactccctgtacacagactgcttctttgtcctccagccaggggtgaagggccatgctggcgaaacagcaaacaaccccaacatgctttgcagcctggccaaccacatgaccagtttgaggaggttggctggagatcacaatgaggaagttggatgagggggtccaacttctagcagcccataagcctatccattcagacaccaaatccatggaaaacagagagacaatatactgattttcaaaagggagacataccccagcaagtacagaccagggaacagggtgctgacgtggccacagttcttaaactactcgacttcatggatggggcacagttttttttaaaggaggatttagaattctatttggcaggtggcatgaaaaagagttttgaatagaaacacacccctccctcccagttgcctgcccagtatgtttgttttgttctcttgaaacaaaggaagagagtggtgaggagggagggaagatgaaccaggaagaatgaaagcacttggcctgcttctcagatggtcttggactgtctccgctcacaggagttgcaggtttttgggttttatgcaagttcggatcacaacaggcctcttgcaagaaccaggcattacctttattccaaaagccttgctgggccttcttgaaaggactggcagccaccacttccctagaaacccgtggcaagttccctcctcccgaccccctgctgtttggtccaggaccccctgcagtcctgactgggacccacttggcccttctcaagggacccagcacaggacgtgtgtttctgctttgatgaaccgccctttcccccctgcagttctagtggaatctcccctcccttatcccattcccacttggaaatgatgatgatggaatgggcgatgccggcttaccaagacatccaagctctctgggtcgaagttggagagaggggtgcacaaaaaggattccactcctgtctgccttcccctgcctccccgctggggtgtccctttcccatggtttcctctaaatcttttcacccatgtccagccacaccattctcacatactgccttgaaactgggctcgaaggggctgcgtgctgagagaaggtcctctcccccagtgatcctccagaggggctgccgcctgggtcccccgagcacctcctaccccaccctccccattcctgccatccccagggtccagggagcccagattccagggaagggttgcattagctcccactcggagtcctgatgcagcagagacagacagaggccctgggagaagtgagcatgaattattaagacaagacaagggtgaggccccagagagggggtggcggaagggtcatgttcatgcagcgagagttgcttcgagcttgaaccgcgtatccaggagtcaagcagattgcaactggcgagaggccttcagaaatgccccgtgagagtcctgtgtgcagagctccatctcagcacacttcctgttcttttggttcgtcgatttttgcattttcagtcccctgtgatccattatttataacagtggagattggcctcagacactagcagtgaggaaaacaaaagcgaagctacgcagaaaaatgacaagagtgatgagcacagcagtcatgacaaatgagccctgtgcggaggcccgggatccgcgcagatgccggcgcgggggaaatgggccctgaaatcccaccgtcaggccaggcagctctgagcgtgacctggagggctgttcagacggtctgggtagccgtgtcctgcgcatgaacatcctccgtcgggagaggaattccccacggattatcagagctgctccctccaccccccgccacgtcccacgcgggccacatcaactccctctgcagcctctggccagcggctgagccctccgtgtctcccctcgttaatgcctccttcaccatcccctcctgaagtttcccccattgcatacacgcgctgaggcccacccggtatcaaggactcccattgcttgcgaaaaagattccacccctcttagaacagagaccagggccgctgtagcaaatggccataaatgccacagcttaaaacaacagaaacggattatctcgcagctctggaggatggagtccaaaatctgaatcgctgggctgaaatccaggtgtgggcagggccgcgctccctctagaggctcccccggagattcccttccttgcctcttccagctgctggtggctgccagcagtttgggaattgcggccgcatcacaccacctttctgtttgttgttgacatccccgcctcccctgcctgcggggtcttagatgtctctctccttcccactgagtttcactccacatttgaattggattaactcatgccatgttaggcaaacgtgcccctcaaatccttccacttaacagacatttattgaaggttcctgtgtgcggggcccaagagaagggacattaaattaggagatgaaccttgggaggccatggcatgcttcggagcctcggcgtcaaaatgacaacccacaccccacttggcggttcatctggggccctggaatcagcagactgaggctggaacccagcaatggcacatgctggctgtatgttctcgggcctcagtttcaacatcagtgacatggggatagaatctgcccagcggagttaagtcaccgcatcccggagagccgagtgtctcatagaggctcctggtgtggtctccatgctgctgctcagcacggaatgaagaggttcaggaacttgcccacagccacggataatgagggacagagctggaattgagcccgggaacctgcacacacagcccagtgtgaccgtgccttctagagagaggccagccctggcaccaggtgggcatgccagcatcaccttcaaggtgtgctttaaggatccaagataatgtgggtgcttcaacagatgcatggcaataaaaggaaagcaccatgtttcaccttcacacacacacacttacacattcacacactcacatacttacacacattctcatacactcacacatatgcttacacacattcacaggctcacacatgcttacacacacattcacacgcacacacattcacacgcacacatacacttacacacattcacacacatacacttacattcacacacatacacttacattcacactcatacacatacatacattcacacacatattcacacattcacacatacacattcacacacatacacttagacaccacactcacattcacacacattcacatacatttacacacacatccacacacacattcacacacattcacatttacattcacaaacattcacacatacattcacacgcacttacagtcacacatacacttatacacagtcacacagacttgcacatagacttacacacatacacttacacacgcactcacaccttcacacacacaggcaatcacacattcacactcacgtacacttacccacacattcacacatacacacaccacatacacgcatacacttacacatgcactcacacactatcacattcacacacacatacacttacaaactatcattcacacacatacacacatacacatgcattcacacacatgctcacacactcacacatacacttacactcacagtcacatacacccacattcacacacatacactcacattcacacgcacatacactctgacacacatatacatacattcactcacacatacattcacacacacacggatgcattagttttcaagtcaggatcctagcacagcccacaccctgcatttgcttggtgtctcctgaggtctctagttatacttcccatcccttttcttgccatgtatttcctgaacacatgttatctttgatccttaaaccatgacttagagatacagatgtatgacaagctgagagatgatgtgagactgttgttaattttttctccatgtactaattacattgtggttatcttaaccacaaaggaagcgttctactccagagaaccgcgtggaaacagtgcagatggactagcacgatacctgagaggagctttaggataactccggtgctggggaggttggggcccagttcaagcaggaggggaggcgtggggacaggtgttgaagctgtgggtgtgcagcggaggcttcatgacgctttcctcctgctcttgtgtacgtctgagcatttccataacagggaagtgttttgttttgttttttaaataacattttaaatgcctctggcacatgggaatccatggtaatttctgtcgttgttgtatattctttttcaaatgcaaggacctgaaaaatatctcctaaactggaaaaggaaatgaggctgaatacagattttattttagcaaatagagaagcagtgattgtctggcggttaactgtaatccattctgagtgtgactttactgttaagtattctaaaaacaagagaccaaacaaaatgaacaatatgtccaaatgtgtatatatataatttgtaactagaggtaaattgcagatgaattgcagatgtacacagacagatggatggacagatgattgatatagattgattgacagatgattcatagataacttgcaatgtttcttcagtgaacgcatatttatttcttgggtaataagaaaaaacaatagaatgtggaatttggggcttggcctcttttagctcatttaaaaaaatattaaacacttggaattatcgagcgctgaaaaaggcaatagaaaattcaccttttaactccctcaaagatagaaatgtgtgaatctgctagtgggttgcgtttggctggtcctgcaggctgatttggtctgttctctctcccagagagatccccaagcccggctgagatgtgcctgtttgtcttgagggcagacaaagcctagcaaaatcttatggaagctgatataaaagcttaatagcttataaaagctctaaaaatgattcacagtctaggatagagaaaataaaaggaatttgaattggtttattttcctttagaggagcctaaatcaatatttattctgagtatgcaatcagaaatatcagtaatttgagaacaaggcaaacagagctgcacatcccgttatggccacgagcccacctcgccttcgttcagaccacagctgaaggtctgacttaggtgcagcacgcacccctggagctgagggcctggagcagggccaggccgggctcttctctctcttgtctgtcctcgtctgtgggggaatgaagatgacacagcactcaggaggtccttttcaggacccagagtcactgggcttttagggcgtttggctctggttctagcccgagtgtggtctcagtccccattggtggttgtggttgtggcatgggcatcattagtcacacaacataaaaccacagaacgcagaatttgctcaccctggttcacacaggagcaagcttgggcaccagcaccccctgaacgcatgccaaagggcaggtccagctcagtgctggggtgtggaggaacccacctggggcctgcctgcaaagacagatgccctgccgtgtttagaaaaagagaaaactggcctaaaccacagtgaggtcaaatggatcatttaacccgtcgagtttggtttcttgttcatccgacgcggttgatcttattaacgcatatgtgtttgtgttgatgtggcctccagcttctgtcgcactgtggacacagttggatgtggctgctaatcaatgcggggctccgtaggtcagtgagagcaatcagagcctgctgtgcggtggcatccccgagttaagacaggcttttgtcccatactctattgaaacacccagaaatgctgacatgttgaagttaaggccatgtgccttggtgctacttgcttgcgaaacagcctttgaaggaaaaaggaggaggaggatccatgagtttcaagggtcccctcctgtaatcacggctgccactcaacggagtaagtaatgtgtagcgggccctctatctgcatgacgaatcctcctaacattcctgtgggcgaggtaggatttgtctcgctttgcagccgaagaatcagagcctcagaaaagttaagaaatcttccctgggtcaagctggtaggaggagggactggaactgaactcacatctccacctcctctcttcctactcctctgcctttcttgcacctagagcagtgtacaacatcaacaactgaccagggcgatcctagaggtaagagacagccgaatggcacggacccagccaagcccaggcctgcccaggtggaacagagccagctaggagcattcggtagcagaggtcagtccgctgattgactgttctcacttccaggcccacagcctcctccaccctgatggtctatgagtctagtgcggccctttgcacaattttagcaactgaacccttttcctcacagaattgtgataccgtcctaacatatgaagcatatataaacagttgggcaaatcataatagtttccattatttcataaatttgcatttgtggcaccaaggagagaattaatgggaacaagagggttcttgtgtgagttccgcatttggatttgggggttcgaggtggcagctataggctcacattagtgtctgcatcactttgcttcagtttgtcacggtggccccccaaatccagaaccgccctcctcgctgtgtgaggagggtcctgcctgcaccgctttgcagacatgggccagcctggatgcctgggcgacgctgccctgcgactcgctggcctgcaggacatctgcaaaacattcaggtctcacggcagtggccatgaacggcctcacagacactgagtggacctgaccccaaagagaatgcgtcgtccttgaacgtgtcgatatttaggttattacacaatgagtgtgttgctttgcaattagtgtctgaaagagttagagcagatgtacatatagaaacgaagaaacgaaatctgaatccatgctgacagattccccctccccaaaccttgctcaaggtaacacaggcgaccaggagcaagtcccggccggccccctgctagcgtggtctgagtggcccaagcaggacccctgcccaggctcactggactctcctggagcccccagacacgacacccttcctcatcactgaaaatccacttccacagtgtaggagatgcatggatctgagggccagtaggaagtgctggagctttaggctttagacattctttttttttttttttttgagacagggtctccatttgtggcccaggctggggtacagtggcgtgagaaattctttaacactctgccgagtcctggcccttggggagtgaggcctggctatgaggcttcttgtcagaactccgtgtgactctcaggatggaagaacagggtgggggctgctcctcccctccctccctccagcccctggcctttgtaaaacggctccgcctacgcgcctgtagccagtgcagaaccagggaggcctctccccttcccttcccaggaggggccccgccttgtcctccatgccggattctgttcgtcctcccccaggtcctctctgctgcctcccactgccccatttcctccaggaaccttcctctctcctaccaccagcctctctcctacccccagacacacactctttacatgccgatttctgtcctctggttaactggcgtttaattttctcagctgcttggcttaatgccaaagagtgttcttccaaataaaaatggtaaagaccttttttctcccatgagaattttatgtaaacgcagtgcagcatgctcgtaggctggttctgttatcaatttctaagctcagcttccagagctagagaacttttttattggttataaaaaccctacatattcagtgcagaaattctgaaaaatgcagaacagtatcagggagaaaataactcatcccccactacccagagaaaaccgctgttaacaccgaagtgccacagttgctggcgttctcacacaggtgtgcgtttaggagtgtgtaagtgcgtgtaagtgtgtgtctggctttctttcacataattttgtgtcctgatcattttcactcagcattacatcagcagcggtttccaatatagcattaaattgtcttcaaaaacatgattttaatgcctctataaagttccatcatggaggctcactaaaatgtaatcacttcattgtttatgagatactcagcttaattccatttctctgcagtgaataatccagaggaacacgctcagtgtgcatctttgcttgcagcagggcagcgcagggcattggttggggtataaatccgggggtgcagtggagattagattagatcgtccgtggaaagcaccagaatggtgcctggcacttaataaatgctcttattagtatgtttatcttcattatgtccctaagagccattcctggaaatgagactgtgagtcaaagggcacaaataccgccaacctgctttccgacagcgctgtgtggatacacgggcccgaacggcgccagcctcactgcctctgcgttagtgccgccacttcatctcagatactctcctgaagataagaggagagtcccatgcagccataagaaagacaacggagagatctgtgtaccctccacccagtctcccctactgggactgtcgtgcaaaattatggcccagtcttacaaccagggtattgacagcgagacaagcccccatctgatccagattctccagttgtacttgctgatgtcgtttagatatttgtccccgccaaatctcatgttgaattggtatcctcagtgttggagtggggcctggtgggaggtgactggatcgtggggtgggtttctcacaaatggtttagtgccatccccttggtgctatccttgagatagtgaattcttgcaagatctggttgtttatgtgtgaaggtagaaggcatctcctctctctccctcacgggtgtgcacgcctcccttcatcatgtgatatgcctgctcctgtttcaccttccatcctgagtgaaagctccctgaggcctccccagaagcccagtgatgtcggtgccatgcttatacagcctgcagaactgtgagccaattagaaattggctttataaatgacccagtctcagatatttctttatagcaatgcaagaacagcctcatgcacttgtactcacttgagcatgtgcacttacttctgcacgatgttcttgcctgtgtagactcttacatccacaaccacagtcacagtctagaacattccatcgccgcaaggctgcctcttataaccaaccacatcccctacctgcacccatttccaacaccccatgcctaactcgatttccagcaccccgtcctggtgaacatgaatctgttctctatctcttcaattccgtcatttcaagaatattatataaatgggattacacagtatgtaacctcttgagactggctttttccaactggcatcattcccttgagatccatccaagtggttgtgtgcaccttttccttgctgagccgtgttccatgttgtgggccgaccccagtttagcactcgcccattggagggttggagggcatccgactcatctctagtgtggggcagtgcgtcaccttctcacaattgtcaacgggattgtcactagtatttgccttccatgtcttggaggccaatgtggctgctcttagaaatcagtcctccttattttggttggggagatttctgatgtcagtttgacgtttataattaataagcatcatcatcaagttacaagagtaaataaaaatatgaggcagggtgaaatgtaagatgctcgagaggctgagatcagtagctgtgtgaatacagcagggcgggcaccagcagtgagctccacggggcccagcgtccggcctcattaaccagctgcccttggggaggagcagagcccgctcttccctcctggggaagggtagtgtgatggaaagacaggctgcccttctctcctgcaggagctcagcatcatgctgtgtacatgcctgggctctcttcttcagccctagccacttaaaaccacttggagggaaagattgtagaataattataatgaggaaaatttcgctccagattcgttactccaagttcagagaagctctgtaaaaattgttgctaaggcaattgaataaagaatgtcagccgatgtaagcgataacagcaagacaatgaacataattgcatgttttacaacaaccaacctcaaagcatgacttccctgacatagatatgttttttaatgattttgaaaggtaacacagacattttcagggatttggagaggaaactaatgccatcctggtttaccagctttatggggtcatctctccggtgaaaaagactgcagccagccttgcagagagggcgctgtcttagggaggcacctccaactgtccccgcgacccagcccctaagtgcttcacatcaacactgttcttttgtgacggtgctgctgtctttcattcgccagcctgtcatgctcaactcaaacctcagttgccatccagttatcttttttttttttcttgagatggagtcttgctctgttgcccaggctggaatgcagtggcacaatcttggctcaccgcagtctccacatcccgggttcaagtgattctcctgcctcggcctcctgaggagctgggactacaggcacatgcccccacgcccagctaatttttgtatttttagtagagatgggatttcgccacactggccaggctgggctcaaactcctaaccttgggtgatccacccacctcagtctcccaaagagctaggatcacaggcgtgagccactgagcccagcctagttatcttgtttgtccaggaattggagcatttctaggtagcaccacaaatgtctgtgcaagaaacccacaatttccagtggtcattggctttgtgccaatccaaactagagtctgacaaacccagcaagaaatattcgcggcagctgcaaggaagctcctcaaatagaaatagaaaaatgaaccagggtctgctcttcccttccgggtgtggaatcaacggaagccgactcaacacagagccctgggggcgtgaggggtttggcgggatctctgccggctgcagatctctgctctgttattaccagcccttctgcccagctcctaattgctctgaagagggaataattttctcagcagccattgccagccacatttggactgaatagatgctgaaatggcaagggtaaatggggcagagacagtgaaaagccattttctatctggagcccaaataaaatcttcctcccacactcctgcctggctcctccgcagcctcaatgcccttctgagagctgcctgccccagtaggaggccaggctgggaccaaggacacccagttctgggtaaccatcttcccatggctccttggacaaccaccttaaagaagggaaaggcaagaagcagaaggaaagcagaggctggacattggaatcagcctttctttaaactaaaaaaaagttttcacatatgtgaatgcgtgtgtgaatttgaagtcgtatgtggaaggggccatatatccgtcaatgcatgctccaaaaatcagaactgatggacggcaaacagcatcggatgtgcagccagcattcttccggcggccacctcccgggggaaataggtgcagcagacaggaccgtctgtgggacggggacaggcaagcatgacagcaggtaccacagatcagggtgcacagacagggctgggggaggcagcgtggcacggcacccacttcccctcggcgtgtctgggctgaagcccagtggactcccgctgatcagaaggatcctccactagaaggatctcactggacgagtcccctccaaactggaacatgcaggtgccttgggcttcatgctgcacctttcagataaaaacacacaggtgagctgggagagctggagtcccatggaccccagagatccaggtcacgaggaggggatcgcgctgcaccaggacacattcaccaaggtgagccctggttcctccccacaggctgtgggcaaggaagtgtcgatgccaggctggctcagtaggtggaagaaccttccggaatgcctgcccgcaggctgctgctggcatcgagtctgtgtcctattttccattcactgcatgcatcctccaagtatgatttccactcggaaccctgagctgcctcatccctcgctccgtctcccctccctcccgcccagctcacactgaaatcacgcctcgcgttcagcggctggagtcctggtggattgctgcttcggggctctcagaaatccctttacttgagtcttggttttacaggaagaccatgaagcaccccccaggagctggagctcctccttctggacccagtgtctcttctcagcctcacgacgaggagacctgctcatggagctgctgcgccggcctgagctctgatccctcctccgacccagcctcaccctgcaagcagcaccatgtggggctcagaatggggatcttaagggacccttcccacaacctcccgataagcctttccacggagggcccaagcggagacaggagaacactgtatttgataaaatagagtcaaatccaggaaaatgcctctggacccggaaaggaaacgactcaccccccacccatgagagacccttctgtcctgtcccttaacccagaggccctgggcatgggtttcgcagccccctggaggccagaccctcaaactccagccttgtttcttctaagtgtgccagtcaagatgcttctcactgcaagaaacagactctttctcaagccagttcaagaagatctgcgttgctgcagaggccgatgggtgtggggagcaggctcagtgagagactgtcgtaaggaggctgagaggtcttcagaaaaatccccaggacctggggtgccaggagcctgggcgggcctgggctctcgcagcctgcagcccctcccctccctctcacagcctccgctgcccccgggctcagggcccctgcctgtgccttctcctgaggcttctcctttttacctctcagggtcccagtgtggccagcccggcactaaacccatgcgaccctggctcactgacagtcgccaccagctccacatctctcagtaaaagttcccccaaaagagtgtgattgggagctagccagcggggcttaaggcagccccctgctccagtccccttggccatggagacagggcagggttagcaggaggcaaggcatgcgcaggacagctggccggcagaggtcccgtgtgctgtcatgggtgcagggtggacactgtgaccctgggtcccccacttggaaggggtgatctagagggacttttgtcagaaagacccccacccagccaatctgactgatggggccatcaccttgacaacaggcttggtggcaaagcaagagggtacaaccgaccagagccccgggtcccctgtgccctcctgcactgcctgacagggctgggccatggcccgtaccaaccgtgagctgagccaggaatccagtcaaaccgtgtgcctgagtgacacgtagctctcttccttctctggattcactgctgatcaaccccaacaagcagcaggactgtcttgctgtgaacccaccgcttgcggacccctccccaggcctccattcccgcctttctgaaggtcaaggcagcgccctccccaagaaacggtgggaacagaggagccaggtgttcgttcttcccagctccggaaacgctgcagattgcgcactcgagttcctgctgacataacagtggctgccagacaaaatgtggcgaaaagtttttctaggtgcctttgttcactcagagacttcctagagacttgtgtgaaaatcacaggatttgcaaccagtggggacgttgagattcgtggcaactgaaatgatacaaacttgaactttgtgtcaaaccagtagtgttttgtgtaattcttttcaaacctgtcatttcacttactgcttctcacagccccaaggggcaggtggagttgatgccatcaaccctatttacagaatggtaaactgaggctcccactggttatgcgcttgcccacagggttgaaagagaagccatggacaaaaggagtcactggttacccaaagggcttcctgttctcaaatccactgctccttccattacgtggtgtctagaaggaggctcttttggatatagacattaaataatctgggagtcagtgtatgctgtgatcaagcatgtgcggtccgcagccgatggcccaggatgcagtcctgatgtacacttctggctgggtgcgtgggagccacacacatctctgtgtgccttggtttccgtgtgtaaacatcttagactagtgcttgcctgtggttggcacctggtaagtgtcagccttctctaatgtaggcagcttgagggctcccagacagtgatgttcccgctgacattcccaggtctcagctgattatgaagaggcatcaatttccagtgggggagccgccctctgtctcatcatttgtttctctcatcttgctttaatatcacagcactgccagtcaaaccacacaaaagggtttgtgatgacctgccgtgcattctcgtaagctccagccctgactcgcctgcaagccagaagccaacataaaactttcgtttttcccttaatcttgctgcctctgcatctcattttcaaatttcattttatcaactttttttgcactatttgtttctggataaaggatttgcaaaattcttcagcatgtggtcaggaagccctatggcctcctgacgaggcagcctaggggtcctcccgtggtctgaagctgcagccgggctggcctcccacagtcaggagcagcatcaggctgggtgcttctgacaccagcgaagagcgcggctgtccaagcccccatccctagggctcacgcctcatgcccaaactcgcacccactttggcgccgctggagactaatgaacagcaaaagctgaagtcatgactctcatccagatctaaaatgaccgtgtgtcaaacatttttactgaactgatgaatcgaatgggaactggtaagaaggtacgaccagttcaaaagagaaatccaagaaccctaaatgtataaggagtgaagcaatgttgaaatggacttacaaacggatgcagctatattctccagtggagacagccagtgccaacttttgtgcttattccaaatttcctgacagcctccccaccttttttccaacataatctcaaagagagattattctggatggcagaataaggctggtccccctaggtgtggcatccttgcttgcatagaggtggcaagagtgccaccataccaaacaggcctttttcagtttgttttgctggaagacctcagaagatatcagaagcaaaagcctctgttgtttgctatcctaaggttaggaagccaagcataaaaagctctcctccagatttcaccggcagtacttataaatttgatgaacccctctcttctcaaggcccccacgatattccaaaaccctggcctgccagagtagagccttttttcccatcttggaggctgtgaccctgagagcccctaccctcccccaggggactttgtgggcatggacgttgcacagtcaccctcggcccctcaagagcggtcacagcccagcaaatgagcgtcgttctcacgcacgtctctcaggcttaggctcggttgcataaaccttccccaattttatcctggcaaggaggaggacagatccttccggaacctttgcagatattgccaccaaaagtaaagccttcataaaagtttgcatttggggaggaaggagagcagatggtgaaaatcagatatcacttaagaattactcatttcagtttacaaaaaatctaggtcgttaaaggtgactgatagcttaagaagacagggaaagggcttcataacagagccggaaagtccaacagtacaacgacacgcatgatgccaaaaagtaaagcgttcctcactcattccactcagtgctccgtaactgattctccactggctcctgggctgcagcctcatgaagccagctgttcctcaactgaaaagagccctggaagccctgggcagcccactggcagggtctgaatatcatctgagcgaggccatcagaagctgtccccaggagtctgtgcttgggggtcagtcatcggaggtgcttactgcggtccttttccatggggctcgaagcttctgcattgaatcacgagctctggcctccagcctggtgcagaaccttccagggggcattggagtaaaagcttctgtagatgacagctaccccttttttggtccattttatagcagaggaaatttaggttcaaagaagttgagttgagagtcccaggagtaagaagcagtcaaggatccccccaggcctccggggccgcctgggctgcctggcctcacgacctggccccatgctcctgagatggagaagccccaggcccatgagcctgttgcccttggcaaagccacttcccttctgagtaaagtcagacgagcctgcccagtcccaagagactgcgattccgtaatcgccctcccctcgccttttgaggtcttgctggtaggtgcacccccttcaagccagcccaaggagccatgatttgagtcggtcttgccagatgtgtctggagagaatttaactccaagatcatcccccgtgcactctgaggggctgggacaggatgtggtgccctttgtgcccaggaggagaagcacccagtggggcggggtggggcgaggactttataaaggcgtcatttgctgcggccacccaggttggaacacagggaccacagggccccccgccttctgcaggaccaccccgctcatctgagggagacactgtagaaacacatctttgagcagtggcttctaatccaagaaacccaatagaagtcaaacgcagattcctagggcccaacccggacccactgcgtgggaatccctcagccggggccagaagcacgctttgaagacaccaacctcctcagcaagcctcttgcaaaccacatcctgcttctccagaagctgcagatccagaatgttcaaagaaagagccctccttgccttcctcttcttccacccctgccctctgcagactggggttctgtagacccccaaagtaagtccgccacaccggaaggaagtgagttacacaggggcccacatgggaaccgctttttgtcctgtcttggtgggaaaatggccacgaccccagcccaggctctgccacgccacaactccacgggcatagcctgggaggccgcagcgtgaactgtgactagggctgaggatggtgccatggtagaagtgagggcctggcacccggccaagtgcaggactcctcggcagtggggttgggagaagcagcctctgcaggcgaggccaggaaccaggacacaggaggagaagcacatctcagaggagggagctctgggaggagccagcagagtcctgcaaaggaggatgtgggggaaatggggtgaggccaaagtgggggctgctgaaggggctactgcacccgtgcgagcagggccaggaccaagctgcataggcagccagggacacagccgatgccacagacgtcaggaaccacgcaatgacacaggccacctttgaccgaccgttacccctggggcaaataccagtggggataacgggcaaggagaggtgctgtttactgtcttattgttgccagttcagcagcccacaggaaatggtgttagtcacagaaaaaaaaaatctgttttctatatttcactgtttccaagtaaagaaaaaagaaaactaatcttagcttaaaaaaaaaaaaaatggtgcgctgggcaccgaaaaataaccatcttcctaggcctgcgtttcccccacaccggggacttgtgctggaaagaaaagctgcgttggcagccaggagccggggaaactgtccagggaggcatcctctgcgatgaaggcggggcctcggcgtggcccgttccgcgctctgtccagccctggagaagccccaccctcaccgagctcgaaataccccctccctgagagccgagactcatggccgggaccccttggacagaagatgcggatgctaacccggcgcttccaccacagccccggcggcactggggagcgagcgcggccatcccgcgcgtaggtggtgtttctctgcaggcgccagtttcaccgcgggcgcccaggatcctcaacggttctgttgtgatgtgattcccctcttcgacttcgtcattcagcctcagtccctcagtccccaaataccgaaaggcagtcttttttttttttttttgagacggagtttcactcttgttgcccaggctggagtgcaatggtgcgatctcggttcactgcaacctccgtctccctggctcaagcgattctcccggctcagcctcccgagtagctgggattacaggcacctgccaccacgcccggctaattttttgtatttttagtagagacggggtttcaccatgttggccaggatggtctggaactcctgatctcaggtgatccacccgcctctgcctcccaaagtgctgggattacaggcgtgagccaccgcgcccggcctttttttcttttttcttttgaagttaatgaacttgaattttattttatttacagaatagcccccatgagatacttgaagacccggtgccaagcgacagtgttgaccccaggtggtcagtcctgcctggccccttccgagggatgcgccttcaccataaccatgtcacggacaggcgtgtgggcaagggggcatcgctgtatttttcacaactctttccactgaacacgacaatgacatttttcaccacccgtatgcatcaaccaaatgaaaagatgagcctgtgacattcccgtgcgtagagttacagcttttcttttcaaaacgaaccttcagtttggagccgaagcggaagcacgtggcgtctgacgtctccagggagacccgccgccctcgctgccgcctcaccgcgcttctgttttgcaggtaatcttcagcaagtactgcaactccagcgacatcatggacctgttctgcatcgccaccggcctgcctcggtgagtgcgcgctgcgggctctgcccggtgacgccacgcggcctcctcgccttttcgggatggctgggaggggcgggaagaggcgctgaagggcccgaggcaccggccttctacaaggggctcttcgaaatcaatcaatgcgcagaatcccgagggaggctcagccgccctccgggcctctctgcctccacaggtgatggctgtgtccacaaggaggaaaccgtcgggctgaattaaacagaaccgccctcctaagagtgtgggtttttctgccgggcgtggtgtctcacacctgtaatcccaacactttgagaggccgaggtgggcagatcacctgaggtcaggagttcgagaccagcctggccaacatggtgaaatcttgtctctactaaaaatacaaaaattagccgggcgtggtggcgagcacctgtcatcccagctgcttgggaggctgaggcaggagaatggcttgaaccctggaggcagaggttgtagtgagctgagatcatgccattgcactccagcctgggcaacagagcgagactccgcctcaaaataaataaataaataaaaaagagtgtgggttttttcctctcacttcttcattcacttttggagaaagcggggtggttgtgtgtgtttggtccccagccccacatcaccccataggtgccttttctacccagggggcttgacccagatcaacactgggtgaaaggctgacttcagaaatgggttgaaaagaccagtgatctgccttatcgagtcctcagagtcccacaggagttaatgtcctaaatcaacagtgtgttcgagccagtgaattttctaattatcagcaaactttccaaatgtaaagggtgagcaggagtagctttggctcaaggattaactttaaagttaggacggaggtggagaagggcaattgaagtttctcacagacaggtgagaaaagggagatgaaagtacacgtctgaaagtgcagcaaatggcagttttagccgcaaaaatagcccatggtctggggcatctttgggcaccatatatgaagcaatgtgccaataaataaatatatatacacagtattccgtatagcagccctgggatttgagtatcacctctatttcacagattttaacaatttacaactgaagatcagagattaacttggtcgaggtaacacatcttgcaagaggccccaaaacatgtgaggttggaggaagactcatcctaagcatttaaaactattttgtaggagagacttgcgcagttcagacggactcccaaaggcactggaagcggaaagacaaactatgagttcgtcatctgctgatataaatgttagttcctattttaccacagttttttaaaaaaaatctcccaactcaataaagtagacttgctccaattcccattttaaagtatttcagcatctacacgcacttaggattatacgcagctgtttaatttcatttacaatcggagtctcaatgccctggggacggcctcccacccttcccatcccaccacaccttggtcaggctggtcctgggactgtcctggttgtctcagggctctggccccatgtgtacattcaagtgtacatcccagagcacactatgggcgaaaacacgggcttgggtgtgttttccaggaacacgaccatctccctgctgaccaccgacgacgccatggtctccatcgaccccaccatgcccgcgaattcagaacggtaagaggctccggccgcgctcctcggggtgtgcctggcacttctctccatgacatgggaggctttctgtgattttgtaaatgtgctactgcagaaaggtgtgaattgacagcagagatggagagcgagggtaggagccagtgtgaaggaagcttgactcgtcgtgttcccctgcagaggagctgggcacgttccaagataacaattgcagccgtggctctgcacctgcttctcaacgggaggaggcattgtacagaggggaaactgaggcccaggagggtgagccaagagctgcagagccaggccccgggatccccacattaaccccaggaaggacctcgggagattccctacagagcccctggggacatttcgtgtttacccacttagggccggtctctgtgttcataaagtgatgcctgtgggagattctaagcacagaagggccagggacaagggaggcccaggaagtcaagaggagaggccggtgaaagcctccgtgaatgtctgtgaactaggtcaagccagcggtgtatggcccaggaaggacgcggagcaggggccctcaggtcagtgacctgcccctgttcctggtgacctggggagaccccagcagcctccactgctctttgtggttgggcaaagtggaacttagatttcctcatgaggcgagggagcaggtgagctgggggcggggcgtgcgacctcaggacccctctctggcgtcctctgttcctcccagagtggggctcactgtgcctccaagggactcagtagatgcgatggtacacttgtcaatctggtcatcagggtgtcctgcccaactgacccatggccagctctgagcccacaggagaaagtgcatgtcaggcagacccttgtgtcagtgaggtcccagtgggcgtggccagcaccgtccccctcagtgaggccccccagtggacgtggccagtgctgcctccctcagtgaggtctcagtggacatggccagagccgtccccctcagtgagcgctcagtagacatggccagtgccgtcctcagcgaggtccccgtgggtgtggccagcgccatccccctcagcgaggtcctcgtgggtgtggccagcaccatcccactcagcgaggtcccagtggacatggccagcgccgcccccctcagtgaggcttcagtgggcatggccagtgccgtccccctcagcgaggtcccagtggacgtgtccagagctgtcctggtcagccgtcctccctgtcaccttgaggcctcagccgagctcctctcatctggctgtgcccgtcagtctcccctcctgccctagccaggatgcccgtctcctgccccacacagtctggctctgactcttggcttccagactccccggaaggtgcagtgctaattggctccccagagactccagtaagcatcttgtcagcctcagcaccagctccagcctggggggtctcgctcagaagcaaagtcactgagtgacctgtcctcctgacacccacaagactaaaatgatctctcagaggggacctcacagaaaccagcaccttgtccatgccagctgggtatctgagagaaactgctttgttttcctgaagtcatttgaaacagcgtgcagagacatttaaactcggcgggaaataggagaagcccaccttgacccttctaattctctggccccaggtgccttattaacaagagacagtatcagacacaccagacaaaagccctcctgagcccaaagagcccaaatgtctggaagctctctgctgagatgccaaaatgcatgcctttctgataaagagacagagacagatgaggtaccatgatatggacatggcagtggacgtggacaggggagcagtggagatggagaagatggagacacacgcagttgaggatacaggcgaagaagatggagacacacgcggatgaggatacaggcgaagaagatggagacacacgcggatgaggatacaggtgaagaagatggagacacacgcggatgaggatacaggtgaagaaggtggagacagacgcggatgaggatacagatggagaagatggaggtagacgcgggtgaggatacaggtggagaagatggaggtagacgcgggtgaggatacaggtggagaagatggaggtagacgcggatgaggatacaggtggagaagatggaggtagacgcggatgaggacacaggtggagaagatggaggtagacgcggatgaggatacaggtggagaagatggggttagacgcggatgaggacacaggtggagaagaggaagttagacgcggatgaggatatagatagatgcatagggtgtggatctaaccgggtacaggtgatgcggaaacggatctagacagcgatgtggaaatggatctagacagcgatgtggatgtgatctagataatgtggctctggacgtagaaagagcttcagatgctctatctatgatcgtgggtgtggatataggcatagacatggtgaagaggagagaatagactctcctctctcatgacaaactgatcgtggctgggggcggcacgtgctgagatgtggctgtatttgtcccccaggctggtgcctgcgcctcctgcacccccgtctcctttgtgccttcttccattccctctgccactgttaggtccaggcctcactgagctctgacctccctgcctccagcctgcctctcccacacggctgccaggttcaacctggtaagacaccttcttctccatggtggcctcccaatctgggccctgccaacttatgcctcaccaacttctccaacttacccctgtacccacgcccgcaccatgcccagcccacaggatcctgccttcccagctctgcagaaccagcttctgcttatccgctaggtgccagcccagccacctgccttaagcaccatccacagtcacccagcccatcaccatcactagcaaagtcacccagacccatcaccatcaccatccagagtcacccagcccttcactatcaccatccaaagtcaccagccccatcaccatcactatccagagtcaccagccccatcaccatcaccattcaaagtcacccaccccgataccatcaccatccaaagtcacccagacctatcaccatcatcatccagagtcaccagccccttcaccatcaccatccaaagtcaccagcccctttaccatcaccatccagagtcacccagtcccatcgccatcaccatccagattcacccagacccatcaccatctccatctaaagtcacccagacccatcaccatcactatccaaagtcacgcatcctgtcactatcaccatccaaagtcaccaagccccttcaccatcaccatccaaagtcacccagtcctatcaccatcaccatcctaagttaccagcctttcaccatcaccatcaaagtcaccagccccatcatcgtcaccatcctatccaaagtcatccagtaccaccaccatccaaaatcacccagacacatcaccatcaccatccaaagccacctagcccatcaccatcactatccaaagtcatctagcaccatcaccatccaaagtcacccagacacatcaccatcaccatccaaagttaccagccccatcaccatcatcatccagagtcacccagatccatcaccatcaccatccaaagtcactcagcccatcaccatcactatccaaagtcaccagcctcttcaccatcactatcaccaggcccttcaccatcatccgaagtcacccagacccatgaccatcaccatccaaagtcttccagacccatcatcatcaccatttgaggtcacccagacccatcaccatcaccatccaaagtcacccagcccatcaccatcactatccaaagtgaccagcccctttaccatcactatccaaagtcacccagacccatcaccatcaccacccaaagtcacccagccccttcaccatctccatccaaagtcacccaacctgtcaccatcagcacatcactggcttcctcccctcagtgtgcgcctcagtctgaagtgatctcacttacttgtttgaggttctcactgctgctggccccgctggacggtcttctctcataggaaggaaatttcaccttgctctctgctggatttccagcccctaaacgaggcggggcatgctgggtgcaggatggaatgagttggggacggagtgaaccagtccagctcgtgcgtgcctccccctctgcactgcccagagcagttttttcttctggggacgcagggcaacgtctggagacatttctggatgtcaccaggggtaagggcctgctacttgtatctgatgggtggagacccgggatgccaatggcatcctacagcgcacaggacaggcccacaacaatgacacacgtggccggagacatcagcggtgctgaggcggagcacctggtgtctgaggtctcccctgtgctctgtcgctgtcctctcaccctcccccaatcttccaacctagtagttctcagacaactgcgtcagaatccgcagggggcttggtggagcacagagctcccctcagtctctggtttgtgacggaggtgggccccgagaatctttctgcagcagaaagccaggctttctgcaggttcccagtgaggaggacgaggctggcccgggacacgccactgatgctcttctgacccaggggcttttctctcccgcttccgtccctcttccctcgccggcaggtgacgttactggccttttcttttttggccctgcctcccccttggcttctcccctcttcctctcctccactcggtgcctggtgacatgcggccatcctcagagatgtgcttcggggcccgcacgccttgctcctcgcactcttcctgcaccggagccgcggtgcgaggcctcgggaatgctcaccgtttctctcccgccccccggccgcatgctgcagccattccctcaccacatgtccaggagggagccggcatcctttgctgactttcttgctgtgactatggtgctgcgtggaaaaggggccgtgggaaggctgggcaggtggctgctcagagccccacctgacacggtgacccacggggcctggaaattcactgccccgatttccacacaggtgcctgagctcctgcagagaatgcctgagagcgagacgcatgcccgtcaatttgtgctttcaggcgtcctaagcacacacgcctgctcttatttgaaccactccctgtaagctagttccactaaagagtggctttccaccctggctgcagattgcaaccacccaggaatctttttttttttttttttgagacggagtctggctctgtcgcccaggctggagtgcagtggcgcgatctcggctcactgcaagctctgccttccgggttcacgccattctcctgcctcagcctcccgagtagctgggactacaggcgcccgccaccacgcccagctaattttttgtgtttttagtagagacgggatgttagccaggatgatcacgatctcctgacctcgtgatccacctgcctcggccccccagagtgctgcgattacaggcgtgagccaccgcgtcctactttttttttttttttttttttgagacagagtttcactcttattgcccaggctgcagtgcaatggtgtgatctcagctcactgcaacctctgcctcccaggttccagggattctcctgcctcagcctcccaagtagctgggatcacaggcatgcacgaccacacctggctaattttgtatttttagtaaagatggggtttctccatgttggtcaggctggtctcaaactcctgacctcaggtgatccgcccacctcagcctcccaaagtgctgagattacaggcgtgagccaccatgcccagcccacccaggaatcttttaaaaggtaccagttgatgcccagacccctcaattaagtccagatttttaagagattttttttttttaaagctctgcaagtgattccagcacacagtctggggactaaccgctgatataaggtctggaaaatctaagaaaccactctaccccaccctctggtgaccagaagcttatgtctaccagacccagggccttcccttgctgaaacatgctgggtaaactctttgtttcttcctagcagacagcagccctctccctctagctcagaagctacgtcagcagttggttggttggttggttggtgggttggttgggttgtgtctctctttaacttcctccacttctgaagtcacctgcagtgacttggtgtggacttggtcacctcactgtccccccagcctcaggcccaggaaccatgtctttggaggaggctctcctgctggcagctggttgcatctggcatgcttggattcctgcaggtggctggttgcacctagcttgcttggattcttcccagattcacagccatagggtgggcgtttcatgaaatctccaaattccaagggctcttgacagaccacctccatcctgatcagaaggggtgatgccggttgcacggtctcttagagcttaaaactctagcttcttctctgctcctcattccaaactaaacaaattgttgcattggattattctttcaaaatactccttgccttaatgccatcctttagattttggtggctggctcctgttgtggaccgcatctcacaggtggacttcctggtttctgcctcctgttacccctcacagttatctctcccttgagtcctgctaccttccagaaaaataggctccaaacacactttcatcccatcactcccagcatggagttctccagtggcctgttggctacaggacactctccagccccccgcattgggatgtctggccccaatccaccataatgtacttgtctccaatctgctgagctgcatgaatgcccaccccagcccagcgggcactccccttctgcaaacctccaagcacattccccctctgcacactgccaatcttcctgtccccgccccaaatccaaaggcccctcctatggctggggatccactggcagctgcctaacccttcctatgctcctggacgtttggtgcaatctggagcacgctcaagccggcatttgaaataacctggaacacgtttacatcatggaaaatatggaaaataggctgattggcttccactcccttttagagctggcaagaaaaataattgatgactaaacaacctaacgaccaacaaatataaaaagtcatagcccaaccatgatcaaataaggctccagcattcctccttggagggactctgagccatctggtgtcattttcctttccaatccgggaacattctggagatcctgacatccagctaacatgggcgttgcttcctgacaaccctaccccttccattccccagtcactactgcttcaagatgcagtggaaggagataaatcagacacctcagtagcgtgagtgaaagtggggtgtgtggtgagacacatacagaggggagagggccagaggacggcgccgtgcgacacacaccattgctccttttgttcccggtttcggccaagttgtgccgcaggtgactctccaccggctgagctctgtgcatgcagggccagtattctcggccattctggcttagagaaaagctttctatattccagaatggctccaggcctcctcctcctcctattaaatgtgttttaaaagaggtcttagagcccaggcagttagatcttagaaaaagacaaatacagtagaagctggaggcaagcttatcctttccaaagagggagtgcttcctgtgttaatttgttattgagcatgatgaagattcagctccattgagactgagccaagagttgactcattcatgggagcaacataacgggttgtgagaagccaaaggattaagcatctgggagccaagactgatcttgagtggcccagaaatgcaacccaaggatcttgggcccaagggccaggaaggtttctgcagcctcctggagcattcacagaggctccctgtccgtccacttttccctctgttgctgatgtgatggctcctgccctcagcttaccagactcctcggagaggctggcctctgaattggttgaatgggcttgaagggggctggactccatttgggtggatgagcaggcccagtgcccctgtatgaggggaagttgtcttggtaagcctgtttttgtgtcaggtccccaggacaccttcctctgagtctcttgcgtgggagaagttgctggacacgcctctctggctctgtccccgccggcactgtgtgggatccatgctgttctccctccagcccttgccccacctcctggagcccttctctgcgcctggtcactacccgccccccacctccagcattaattttctagggacaaggggcaggggaaggaggagaagaaagagtccttgctgctcctcagagaagacacaggagaagaaagtcggagaggagtggggagccagggtggcaaagccccttcctgctgcccacgcaggtcctggctttctctccacccactgcaccatttccagggctgctctcatggtgggagccggagagacactgagaagaggaaggaaggaggatccaagaggagcccagcacacccggcttctctgctgcccaccctccactctgtcctcccagcccaggcccttcctaggcaaccctggcacgggtcctcactggccacactgaggccatcagcaaagcacctggcctcttcacgccttgggctctgggtctgtaaggcagtgaggctgaggttcctgggacagctgggcactgtggacttgcccagctgagcacaggcatcaggggctagaggggccctagtcccgatgacgaccgagtgccctctccacctggggagcttggaggactttgctctgcacttagggccacgcttcaagcccagtgcctcttatgaccaagtctctggggagaaatgagccctccagtgccaaatgacccaccactaaaaggccttttgaggcagggcctctcctgagcccacgcaggcacgtggtgggagatgagagggtgtgggctcacttcttgacattctgtgtgagtgaggtcattcatagggtgaggggagaatcaaggggacagagggccctctagtccccagcacttgggctcagctggcaagtccacagtgcccggctctcccgagaacctcagcctcaccgccctacagacaaagggcccaaagtgcagggaggtcagtgccacacaggttttattttttcacattattggtgtttaaaattgtaaagattttccacgttacctgtaaccatcaaaccacatgtattgcccccagttaatcaccatgaacagcttggtgtgtatacccctccatattcactgtgtttcttcttccaggaatgagctcattctctatacatcactccgtaacttgttgtttttacctagtaaggagtcatgggcgtcccaccaggtgaatacttgcatgtttgtcttcatcttcttaacaactacctgacactgcagtgtctcagtctgtctgaacttaaacagctagacattgagttctcagagtctggaggctgaaatccaagatgagggtgtgggcaggttctgttcctggggaggcctctcttcctggcttgcatacagctgccttctggctgtgccctcatgaggcagagcaagagacagctctggtgtctttggcccttgtaaggacaccaaccccatcccatgggccccaccctcaggaactcctccaaacccaatcacctcccaaggccctacctcctaatcttacccactggggatgagggcttcattatatgaatttggggtgggggtgcctcaacattcagaccccagcaccatgggaccactaatgtggcatcctgcctgtggagagatgcacagactgacccatccagacagcacagtggagcacgctctttcaacccacctgcacctgaccacagtgggcactcaggaagaaatgggtagagcgagtgaatgaatgaatgagcaagtcaaagacatgaacacatgacatctgactgtctccctgtgtgcttgtgtttcattctgatacatccctccctaaattcatctgctgagacaaaggattttaactggtgtttctacactgctttccccaagatgtggcaacccacaccccaccagcaacacctgtgatgtctgccgccctgtgtccttgtagcacctctcttaccaggtttccaaatgttgctaaactgctgggtcaaggaatagcatctgcctggggttagcctcacttgtgtggattttttcttactcctcttggccactgactgctcctggtctatgcctgttccattggctgcactgtccttccctgcctcttggccagaggctgtcgtgtgtcagcgacagaaacgttttggctgtcgtctgcacagccagtattctctccccatcacgctgggcctcgtgatgatggggggaggggggttgacatcacagagatcccagtgcattttcgacttcatcactgtcaccatcctctcttgttcatttgggggatacagccgccatcagctcaacagagcaaaagagagggaggccacctgcatccgccaggtgctgaaatgggtccaggcagctgccagagtctgacatttccaacttgatacagcacctgtgatcggcagtagtacccatgacaacatttatttaattgaccaaacacgaacattatagaggaaggtgatcatttaaatgatatacttgaaattcatctgagtaaggaagctgagaacagtcaaagaagctaatttaaaaaataaaaataaataaaaagaaccacctaatccgctgatttctaatcatgccgagtgcttatctctcctgccaggcatacagcgagcgccttgcagagtctcacagcggcactgtcttctcttttgcagcactccgtacaaagtgagacctgtggccatcaagcaactctccggtaaggccctgctgtcgttttttaaactaaaagaaggaaaaagaaatcttgagcttgcccctgtgataaaatatatactagttaagcatttgaatctaagcatttgaaatatatatgagttacctttgaagcatttaactatatgttagttaagcatttgaatctgcatttgaagccgatacaactgcagaatctgaaaccttgtactactgtaagggctctgcctttctaaccccagggagaatagcatctgcctggggttagcctcccttgtgtggattttttcttactccttttggccactgcctgttcctggtctatggccgttccattggctgcactgtctgtccctgcccctcggccagaggccatcccaaggactttgcagttgcagggcggcatccactctggtcttcctggcccagcacctgtcctccccgctccactgtgagttgccaaggcaggcatttgtggcccctgggatgccttggggtgcctcatacagttacttgggccgctgtgttacaatcctttttctttttctttttttttttttaaaaaaaaacggagtctggtcctgtcacccagggctggaatgcagtggcacgatctcggctcactgcaacctctgcctcccaagttcaagtgattctcctgcctcaccctcccaggtagctgggattacaggcgtgcaccaccaagcctgggtaattttttttgtatttttggtagagacgggattttgccatgttagccaggctggtctcgaactcctgacctcaggtgatccacctgtcttagcctcccaaagtgctaggattacaggcgtgagccacagcacccagcctagaatgccttttccatttgatttttatcacttttatttatgtgtgatttatacatcataaaatgccatttaagtgcctattttgatgacttttgaaaaatgtgtacacccttgtaaccatcaccaaaatcaagacatttgcaccacctagaaaagctctctcttgccccctccagtgtgtctcagtccacaacggacctgctttctgacatcatccatgagatttctttttgagagtttcatatataagaaattacatggtatatgtactctttttgactcaacataatgtttttgagatccatccatgtgctgtgtgtagagacagttcatgctttgtattgctaagtggtatcccatggtgtaggttgtaccacagggcgtcttccattcactgtggatggacatttgggttgttaccagtctgggggcttttaagaataaggctgctgtgagcattaaagtacaagtattggtggaaacgtatatttttatatatttcatttcacttggctaaatacctatgatacctataaccttgccaacttttttatacagttaaacatatacttaaccgtcttccctaagagtggatataagagtctgtagagtgttccccagtctgggtttgtctgacgtttctctcacgaccagcctgggtgtggtgggttttggaaggaatacgtggggcgcatgacagccaggtaggaccacgagcttctccactgcagagttactgttgatctccttccctgctcttctttgaaagcaagtcacgaagtccagcccacccaaacacaggagagaaaaaccgaggttcgttttctctacacagatattcatttctccagcaccatttgttgaaaagatgatcttttctcccactgaattaccatgacacctttgtggaaaatcgatgggccatgtatgtgtgagtctttttctggactccagatcctgtcgtgtgaatttacatgtcttaaaacaacagcacaccatcttgactaccgtagataaatagtaggtcttgaaatcaggtactctaagttatctctggtttcttttttctttttcaaaaatgttattgcttttattttcaaataaattttagaatcagtctatgaattgcttccaaaaaaacagtctgctaggattttgactgaagttgcattaaatatacagaccaatgtgggaagaattaatatcttaagaatgttgagtcttctggttcataaatatggtctatctccccattcatttgggtttcctttaatgtttctcaataatgtgttaccattgttaatatgaagtacttaataaatactgataaatacatcactatttcatgtatttaatggtactgcaaatggacttttttttcatttcaatttccggtagtttttagtttataggaattggcttctgtatgggaccttgctaaactcatttattaggtctagtacctttttgcagatttcctgtgattctatagatgattttcttatagtgctggtcttctgacaacaaattccttctgcttttgtctgaaaaagcttttctttgctgttttgcttttttttttttcaaagagagagagagataaagtctttgtctgttgcccaggctggagtgcagtgatgcggtcatagctcacgacagccttgacctcctaggctgaagcaatcctccctcctcagcctcccaagtagctgggactataggcacacaccaccatgcccggcgaattttttaagtttttatagggacaaggtcttacagtattgcccaggctggtctcaaactcctaaactcaagtaatcctccctccctgagattacagacgtgagccaccatgcccgactgacagtgtttttatttcatcttcattttgaaagggtattttcttgccatagagaattttagtttcacagttttccagcactgtgaatatgtcttctcattgtgttttagctagtacagcttctaatgagaagtctgtgatgtcttatctttgttcctctgtgtgcaatgtgtctttttccctctggcaacttaagatgttttctttatcactggtttgcaggaatttgattatgatggccttggtgtggttttcttttggtttaacctgcttggtgttcattgatcttcttggaactttgggatcatatttttcatgaaatttggaattttttctgctctcctctgtctctctcctttcccctgggaccctaactacctgaatgatagacagcctgagagcgtcccctgactcactcacactgtttctttctttccagacctttttttctgtttgctttatttttcttagacttttccgtgacgtcttccattgcactggtcttccctcctgcagtatctagtctgctgttaatctcgttcagtgaaattttcatttcagatattgcattcttcatccctaggaattatgtttccctcctttttcgtatctcccatttttacatctcccatttatgcctcattatgtttatatttcctgtaaatgcttatacctcattataattctgtttcatgccattgtctgctggtttcctcctctctgccatatccgagtctgtctctgttgattgatttatctcctgggtatgggtcatatttttctgattctcgtgaatctagtagatcttgatggaatgctgatcacaggaatgcacgctggttcatcatctggttttgtttctcccagttaagagtgttgggctttgccttggcaagcagttaagttacttgcacatcagtttgatgcctttgagccccacctttaagctttgtgagaatggctctagagggcccttaccccagggatagctcagtcctactaagacttgatccctttggggtctcccccaaactcctggctgatcaccaaattccactctggctgtttagagtgcaaatgtttggagatgagaatgaaagcgccagggccttgaaggtcgttgcaaggatgctggcttttatgctgagtggcgtgggcagctattagaaggctttcaggagaggagtgacatcatcacatttgtgttttaaatcttgctcagggcgctgggtcgagatcacgaaagggaagtggcagcaaaggtggaggcagagaaatccaagaggaagctatttttttgggaggaggcggaggcctaggccggggtgggggccatggaggtgatgaggagcgcaggttccagcaggttctaaaggaagagacaagctttttcctaagtggaagcgggatatagagacccatccggggcttctttgacctgagcactgagcgccacggcccagggagggggttgctgcgggtgggcttggtctgctcatcagacatcaggtgcatgaggagcaggcagagtcagggcaggcggcctctcggctgtcggctcccaatggatggtgttgaagtctgggacttggtgaggccagcagggagtgagtgagcaccagcaggaggggccaggcctgagccggacggagaccgaacccatccgtgggagaaggacgctggtgacaggacaccatcgggagcagaggggaagccataaagccctggaggcaggaagaggcaaaggctggccgggtgtgggtgaggtgctgcagggctctcgcaggccagcgaagacaggcgagatggctgtgctcagagttagaagagcatcgctgggagcagaggaaagagggatttctgtgtcacctggggacccatccaggaccagtgggagatggagttgggctcattgagggaaagaggtgaatggaaggaagttggaaccagctgtcctaaggccggagctgctcctccctggaggactccggcaaaggctgctggccttgggctgtgcgggcacccagtggctgagagatcgttgccctctgcagccctcctgcaacttggatcctaggagccacaaagaggcttgaaaaataatccatcctgagaaacacaaaggctcacattaaacttcgcatcgtaaagttttgagtaaaagaacaataaggggcatttctgctaaaggtgccaggatgagaaaaagcaggaaacagtgctgcaccgccaggctctgcaccgtctctacagagggctggggttggttcaggagcattcggcccaggctgtgatctcgagaaggtggtcagggcccaggctcccgccagccctcacggcagcacgaggctggtacgagacaggtgcttcaggtgtttgttgagagctgcacacacttctgctgggctgggcaagacttccctcttcagagaggatgagcggccacacggaaggccaggctgggtgtccctccgggccagccgaggagcgctgcgcttattccgcagtgaggagtcgctggctgtccaggggagctgcattttcctagcagcgacaacccctcccacatctccatagtcacatcctggctgggctaacaccacctttccccgcctctgggtgcgtggggaccccgctctccaaataggccagtgttccaggcttttctttaggagacaaagtcggtgtcaggtagaccccccccaccccaccaaacacacacacacacacacacacacacacacacacacagctttcctgagaaatgtgtttacagaacattttttccatttggggtttgtccttaggaattcttcactctctctatggcaacaaccttccctctcccgtccatcggccttgggtcccagagccactgagccgtggcccaaggtcaggagttagctctagcgacgccgccctgagttctggcctgtaagcaaccccaggtgcccttgtgaatcaacagaccacatttccagtggcagaaaaggaaatgggagctgtttctagactagcacaaggctcagggggtggggggtgggggcagggtgcagggaggccaacgccacacagccccacacccagcctttcccaaggccctgggttcctcactgattctcagcaggtttcagtaaatgcctctaacgggcccggtggaactgtgcaatgcagaaacaccccagggttttgctgttttgctacttaaatattcaggaaatagtaaagagaagagtattatcaaaaacgtgacttttcatagaaaagggagaataggccagccctggcctgggtccacaaccccagtgtgagctgcagagacttctctggagcggtgaacagctcctgccaggaaagagcatggcacagcctcgttctccagcgtagagtagaaggaatggccccgtccacgcgaaggtctgtgttcaccaagcatcttctgtagaaaaatgctctcttcgcctgatcatgggagggaatcaaatggatagagcatttatcccttttgtgactaaaataaaggtaatagcaactacaaaaaccacgacacaggcttctcagcatctttttataacgatagtgctgattttttggaaaatccttgagcctcaatcacttttatttgatgtaagccgctcaaactcaaagagtgttgttttccagattataaaacacagatctcagctgatggcggttgacgggtgtcccccgagtgccctcggctgccaggagctggcaggggagatgcctgtgatgaggattgggtgctgtgatcacagcacgcgggaaaaggacagggcctccctcagcgtggcagatcgcgtgggtccatgggtccgtgtgatctcatgaccgtatcaaggggattgtgtctttttgaccagagcgttagggaaagcgtgctgcagtcacacgccaggacggccccccacggcccaagtcctataggagagccaggggccatcacgattttcttaggcacagcagcagttgaaccgtgctgtcacacttaacccaagtgatgacagcctcttcaactaggacagtgctgtaggggtctggttctgcttgttctcccccacattcctgcctgccctaggacccaggacctgtctctagtcacacacaccctgttcagcctctgcatctggcccccgcggagacccacaccacattctactcccctggccagagaccgagggtgactcggaggcttccagttcccagcagctttattggcgttgctgtttccatagaaggacaataaaagggggccataaggaggcgcatccgcagagtgcgtgcttgagcttctgcaagccagaggaggccggcggccggcagggtgggcaggctggctggctgtgccccacaacatgcatgtggagaggttttgggggcagccatggaaccccggagctgcccccacatgagagttcccccaggtggtgaccaaatgcatttacagtccagccgcagtccagatgcagatgcgctgtaactgtagaacacacagcaaattctgaaggcttagtatgaaaaagaatataaaaatctcagtcatttttatattgatttcatgtttcctggttgagatgtcattgatataacataaagcccaccattttaaagtgtacaacctcagccaggcatggtggctcacgcctgtaatcccagcactctgggaggctgaggcgggcagatcacctgaggtcaggagtttgagaccagactggccaacatggtgaaaccctgtctctactaaaaatacaaaaattagccgggtgtggtggtgcacatctgtaatcctagctacttggaaggctgaggcaggagaatcgcttgaacctgggggtagaggttgcagcaagccgagatcacaccactgcactctagcctgggtgacacagtgagactctatctcaaaaaaaaaaaaattgtacaacctcagtcttttttagtgtcttcattttgttgtgcaaccatcaccactatttaattccagaacatttccatcaacccaaaaagaatccctgtacctgtgagcagtcccccctccatccccttcaccccccagcccctggcaggccctgttctctgtcctgtgcattctgacctttcacataacagaatccgtggcctttccagcctggcttcttccactttgcacacggtgttgcaggctccccgcgttgtggcatatgacagctctttgttcctttatggctggatgacgttccgttgcgtggctgcgtcctgtggctgcattgtgtggctgtgtcacgtggctacgtcacgtttggttgatccgttcatcagctgatggacatttgggctgtttccacaaaggctcttgtgaatgatgctgctgcaaacgtttgtgtgcaaatttttgtatgaaagatacatggtgaaatgaggtattttgaggtacattggattaaatgagatattaaaaatttttttaaagtctagccgtcttgaaggggagggcctgagagaagtgctgaaagttcacagcagaggataccggatgctgcgggtgtgccaggctggcctgtccaggaggtccctgcagcctgggtgggaggtcccttacccactaatgggtgcctcctccaacccctgagtccccctacctgaggacttcctctgtgtgtggcatacgcggctgccccgaggtcagtcctccccagtgaaagggagctgaaggacaggtgcccagcttctttgctccacagtgggaccaatctctgacatcatcaatgcagttgctcaaagggagctcagagcgaggagtcacctgtacatcaactcaccctctgggagctctcttcccttccatgcctcaatcccccactccctcccagggcttcctgggctggcctccaaatgcaccactagcccccagctccttgtctccggtgggcttttgaggatttccaactaagaaccttagactccaagacaggtcaagccccctggcatactcatttgtcatttggatgaaatagccttaggagagctacttaaccccactgaacttccatttccctgacaaaataggaattctaatgcataccttgcatggttcttggaggataaatgaagtaatttatgcaaaatgctgagcacagtgcctgccacttggtaagcgcccagtaaatggttgttatcattgaaaatgacttagggggcatttttgaatggctaaagttatgtctctctggaattgctgaattttaatagaacaggaatgcttcctaaggtctaaaacaaaaggcggaggactggctgtgtctgccctggaagccaagttaatgctggatgtctgcgcatagacatgttgctcatgagaaataataatgctccttaataatattgtctatttcagtgcaatttcagtctagaaggctttataagcaaagccacagtcatccttacttgcatttttttgaaacaaaaagactgcagtgtataaatgaaaaataaccatttctggaatggtgtgttcagacggattccccttagagtagcctagccaacaaagacagcagcagcccttagcgtgccactgtcagagatattgatggcaaacagtaatacggaagcctgcggaatggaagtgtcctgacggcagatttgagtaaaatggagatgatgacagctgaacattgctgcacggacctcaagactgcaaacgttaggactgccctccctgctcctaggcatttgtgagaaccaggccaacccatacccacccactgctgtgtcctgcctgactgcactgaaatgcacagatcctgtgggtgcagtttgatgagttttgttttgttttttgttgtttttgtttttgaggagtttcgctcttgttgccgaggctggagtgcagtggcgcgatctcggctcactgcaacttctgcctcctgggttcaagcaattatcctgcctcagcctcccgtgtagctgagattacaggcgcatgccaccatgcccagctaattttttgtatttttagtagagacaaggtttcaccatgttggccaggctgatctcgaactcctgacctcaggtgatccacctgcctcagcctcccaaagtgctgggattacaggcatgagccactgtgcccagccacagtttgatgagttttgatagaagtgcatgtgttagatctttcaggaatcaccacccaaaccagaaataccatttgacccagcaatgacgtttatatatatacccaaaggaatataaatcattctattataaagatatatctacatgtatgttcattgtagcactattcacaatagcaaagagatagtatcaatccaaatgcccatcaatgatagattggataaagaaaatgtggtacatatacaccatggaatactatgcagccataaaaaggaacaagatcatgtcctttgcagtgacatagacagagctggaagccattatcctcagcaaattaatgcaggaacagaaaaccaaacaccacatgttctcacttataagtgggagctggacaatgagaacacatggacacagggaggggaataacacacactggggcctgttgggagggttgggggagggagagcatcaggataaatagctaatgcatgctgggcttaatacctaggtgatgggttgacaggtgcagcaaaccaccatgacacacgtttacctgtgtaacatccctgcatgtcctgcacatgtatcccagaacttaaaattaaattaaattttttaaaagtgcacgtgcatgtaaccgccaccacaatcaagacagaggacatttccatcaccctagaaaaatgtccccgtacccccttcaaggcagtcctcactgtggagtgctctgcctatttttgagtttcacggagttgaaatcatacagcacgagctctttgtgtctggactctttcactcaacatcatttttgtttgtttgtttgtgtgtgtgtgcgtttgttttttgagacagggtctcacgcctgttgcccaggctggggtgtgaggcacaatcatggctcactgcagcctcgacctcctgggctcaggtgatcctcccacctcagcctccgagtagagacatgttgcccacgctggtgtcgaactcctgggctaaagcaatccgcatcatgatgtttgtaagatccattcgtgcagttatttccttttgcactgctgagcactgcatgcctcgctcattcattcttctgtggagggacatttgggtcatttccagtttagggttcggctactagaattattgtacaagtcttattgtgggcatccttgtccatgatcttgggtccacctaggagttaaatggctggctcatatgctgtgtttgtttaacttaagacttacttgttaagtgtaagaaactgccaagctgggccgggcacagtggctcacgcctgtaatcccagcactttgggaggccgaggcgggcggatcacttgaggtcaggagttcgagaccagcctggccaacatggcaaaaccccatctctacaaaaagtgcaaaaaattagcagggtgtggtggtgtgtgcctgtagtcccagctactcaggaggctgaggcaggagaatctcttgaacctgggaggaggaggttgcagtgagcagaggttgcgccactgcactccagtctgggcgacagagcgagactccatctcaaaaaaaaaaaaaaaagaaagaaaaaaagaaactgccaagctgttctaccaagaggttgtaccattccacattcccaccagcagcatctgagtgatccagctgttccacatccctgcaacactaagcattctctgcttacattttagacattcgagtaggtgtaagagcaatcctatcttcttatagttttaatttgcatttccaagtaacttaatgatgttgaacatgttgctatgtcttattgactatttgaatgtcatattttgtgtagtgtctgttcaacaatactttgctcaggccaggtccggtggctcacgcctgtaatcctagctctttggaaggccaaggtgggtggattacctgcggtcaagagttcgagaccagcctgaccaacatggtgaaacctcctctctactaaaaatacaaaaattagctgggtgtggtggcaggtgcctgtaatcccaggtactcgagaggctgaggcaggagaatcgcttgaacccaggaggtggatgttgcagtaagctgagatcgcgccttgcactccagcctgggtgacagagcaaaagctgcatctcaaaaaaaatatgtaaaaaggattttgctcattttttaagctggcttgtattatttttgtcactggtttgtaggaaactctacataagctaggatataattcatttgtcagatatatgtggcaaacatttttcccaatttgtgatttgcctttttcgttttcttaatgaggtcatttgatgagcagaggtttttaatttggtgaattccatccaatgtaacaagtttttctgttgtggtcagtacttcttgtgtcttctctaataagttttgtttttttttttttttgagacaaggtttcttgttgcccaggctggggtgcagctgtgcgataagctcactgcaacctccgcctcccgggttcaagtgattctcctgcctcaggctcccgagtaactaggattacaggcgtttgccaccacgcctggctaatttttttgtatttttagtagagatggggtttcaccatgttggccaggctggtcttgaactcctgacctcatgatccacccacctcggcctcccaaagtgctgagccaccgcaccaggccccccaaattgctaggattacaggagtgagccaccatgcctggccctaataattttttttatcccaaggtcatggagatacattttagaagatttagagttatagctgttatgttttttcttaatttaaagaaaatttttaacaacccaatctgttgagatgttatgttttaatctgtcattcatttcaagttaatgttgtgtgtgttgtgaagtagagactgccattcattttcttccccacgctgacacccagctgttactgcaccacttgttaaaaagactccttttcccgctgaatccatggctcctttgttgaaagttaatggtatctctgtgtttgggcctctcgctgaactctgttctgcttcattgatctatttgtctatcctcacaccaacaccacactggctacgttactgtgccctggaatcaggtactctaagttctccatgtgttcttcctctgcatttgttttgactgtataggttcttttcttttccctacaaattttaggatcaacttgtcaatttcaaaaaaaaaagccatctatgactttgattactattttatttactatataatttggggagggtagtgtcttaaccatactgagtcttccaacccatgaacatgatacatccctccacttatttaggtctcatttaacttctcaaaaggttatggctttcaagataaaggtccttcatgtcttcggttaactttactccaaagtgttttctgttttctggttttattgtgaataagatttcattaattttccaattgtttgctgctagtttataaaaatataatagatttttggatgttggcgttggatcctgtgaatttgcttaattcattggttagttctagttgttgttttataggttcctataattgtccacagagacaatcatgacatctaagaataatgacagttttaattattgcattccaatttttggcttttatttcttttacttgtcttgttgtactagttgaaactgcaatacagttaaataaaagtgagagcagacgtcctcgccttgttcccaatcttagaggagatgccttcggtctctcaccattacatacgatgttagccacagatttttttgtggatgcctttcataaggttggaagtccccgtctaatgttagttttctgagagttttttgtctcatgttctttgacaaaattctttgttaacttttatcaaatgttctctctacagctactgaggtgggttgaggaggtgtcctctttttccttgttttctaatggttttgtcccataaagaggtattggattttgttccagtacctttctgcatctatgggatgagcatacatatggtttttctgctttattctattaagataatgaataatactgattgattttcaaatgttaaaaccactttgctttcctagggtaaatgcacttatatttccaggaaatgttcctaggaaatttcctggggtaaactcacttgtatttccaggaaatatttccaggaaaatacttgggaataaatgtaacaaagtatatgtaggccctctccctggtgtgtttgctttttatgtattgacttgtttttgtttttgtttttgttttgagacagtgtcgctctgtcacccaggctggagtgcagtgctgccatctcggctcactgcaacctccgcctccaggcttcaagtgattctcctgcctcagcctcccgggtagctgggattacaggtgtgcaccaccacaccagataatttttgtatttttagtagagacagggtttcaccatgttggtcagggtggtctcgaactcctgacctcaggtgatccacccgcctcagcctcccaaagtgctgggattacaggcgtgagccacagcacctggccgcttttcatgtattgctagatttgatttcctaacaattcgttaagaatgtggctgtctatgcttaaatgggatattgatttgtaattttttttcttgcagtgtctttgtcatgttttgatattggccctatagtggcctcataaaacacattgggaagtttactttcttctgtattttctgaaagattttatgtaattttggtattattttgtcctatgtccctttacacttaatgtatttgggttttttgtgtgtgtctttttaatagttaataacaatgtattttattcttgaaaatcactgagagtacattttgcattctcaccacaaaaaaaaactatgtggcataatgtgtatgttaattcacttgatttagccattctacaatgtatatatttcaaaacatcatcttgaccatgggaaatgtatctaatttttgtcaatttgttaaaactttttttttaattccaatttttttttttttgaggtggagtctcgctttgttgcccaggctggagtgcatgaccatgggaaatgtatctaatttttgtcaatttgttaaaactttttttttcattccaattttttttttttttttttttgagatggagtctcactttgtcgcccaggctggagtgcagtggtgcaatcttggctcactgcaagctccacctcccgggttcacgccattctcctgcctcagcctcccaagtagctgggactacaggcgcccaccaccgtgcctggctaacgtttgtatttttagtagagatggggtttcactgcattagccaggatggtctcgctctcctgacctcatgatccacctgccttgacctcccaaagtgctgggattacaggtgtgagccaccacgcccagccccaacttttattttacgtacagatctaaacgtatcacatgcaggtttgttatgtggtgtgtcgcacccagatggtgagcagagcccccaagtctttgttgatatggttggggttagctctcccagtctttgttcatatggttggggttggctctaccagtctttgttcatatggttggggttagctctaccagtctttattgatatggttgaggttagctctaccagtctttgtcgatatggttggggttagctctaccagtctttgttgatatggttggggttagctctaccagtctttgttgatatggttggggttagctctaccagtctttgttgattagctctcccagtctttgttgatatggttggggttagctctaccagtctttgttcatatggttggggttagctctaccagtctttgttgatatggttgaggttagctctaccagtctttgttgatatggttggggttagctctcccagtctttgttgatatggttggggttagctctaccagtctttgttcatatggttggggttagctctaccagtctttgttgatatggttgaggttagctctaccagtctttgttgatatggttggggttagctctacctgtctttgttcatatggttggggttagctctaccagcctttgttcatatggttggggttagctctaccacgttgctatttgctgtttcttgatcttgggttttgtttttctgttcctccttttctgccttctcctgtgttaattgaataaatttttgttttccattttattccttctgctgactctttagctgtctctttttgcattatttttcctcggctgttgtaagtgttacaatatgcatctttacttttttttttttttttttttacaattgatagactttgttttttagattcacggcaaaattgagtgaaaagtgtggagctcccacatgttccccccacacacagacattcagcctctgccaccgtcaacgtcctgcatcagattgtatattggttacagccgggcgcactggctcacgcctgtaatcacagcactttgagaggccaaggcaggcagatcactggaggtcaggagttcaagaccagactggccaacatggtgaaaccctgtctctactaaaaatataaaaattagccaggcgtcatggcgcacacctgtaatgccaactacttggcaggggaatcgcttgaatccggaaggcggaggttgcagtgagctgagattgcatcactgcactccagcctgggcgacagagagagactctgtctccagacaaaagaaaaaaaaaagactgtacattggttacaatcagtgaaccaacattgacatatccttatcagccaaagtctatattccacctcagaattcactctcagggctgtacattccctgggtttggacaaatatatgatgacctgtgtgtcccatcccagtctcagacagaatcggttctctcagggctgtacattccctgggtttggacaaatatatgatgacctgtgtgtcccatcccagtctcagacagaatcggttcactgccttcaaaaccccctgtgcgccacctattcatccctcccgccccaagccccagatctttttactgtctccatagtttggccttttccagaatgtcacatagttggagtcatacagaataaagcctcttcaggttttctttcacttactaatatgtctttaagattcttttatgccttttcccggcatcttagcattgaagcatattccatggtctgtatgtatcacagtttatttgcccactcacctattgaagagcatcttggttgcttccaggtttgggcagttatgaataaagctgccataaatatttgtgcacaagtttttgtgtgcacataagattttaacacatttggataaataccaagaagcacaattgctggatcttttggtaacagcatgtttagttttgtaagaagctgccaaacggtcttccaaagtgactgggccattttgcattcccagcagcaatgaacgagcattcctgccgctccacatcctccccagcttttgtgtttcagtgtcttggattttcaccactctgataggtgtattgcagtatcttcttcttgttttattttgcaattccctagtgacatatcatgataagcatcttctcatatgcctgcttgccatctgcatgtcttctttgaggtgtctgttcatatcttttggccacttttaatcatcctgaacttttcacaatctatttagaattaatactgtaccgcctcacataaaaaataaggacactgcagctatataagtctacttactcccctctcccaccacctttgagttattgtgtcatatgttttatatctgcatacattttaagccccataatacaatattataatttcctttttttttttttttttttttgagacggagtctcactctcttgcccaggctggagtgcagtagtgagatctcagctcactgcaacctccacctcctaggttcaagcgattctcctgcctcagcctcccgagtagctgggattacagatgtgtgccgccacgcccggctaattttttgtatttttagtagagacggggtttcatcatcttggtcagactggtctcgaactcctgacctcaagtgatccacccgcctcagcctcccaaagtgctgggattataggcgtgattataggccactgtgcctggcctataatttcttatttaaacagctagttgttttctgaagaaattatgaaaataaacttccagatagttttttaatagttgcctatatatttgccatttctgatgtttttatttcttctcaacttccaacttatattatatcccttcactctaaagcatttcttttttcttttaatgtttcttgcagtgcatatctgctagtaactaattctctcagcttttgctgattggaacatgccttttttttttttttttttttttgaaatgatgtcttgctctgtcgcccaggttggagtgtacaatcagttcactgcaacctccgcctcctaggttcaagcaattctcctgcctcagcctcccaagtacctgggattacaggcgcccaccaccatgcccacccaggcactccacccaggaggtggaggttgcagtgaactgagatctcactactgcactccagcctgggcaagagagtgagactccatctcaaaaaaaaaaaaatttttttgtatttttagtagagacgaggtttcaccatgttggccaggttggtctcgaactcctgacctcaggtgatccacccacctcggcctcccaaagtgctgggattacaggcgtgaaccaccgtgcccaggcaaggaacatgcctttattttgccttcattgtgaaggatgagttttcatggtgtggaattctgcattcacagtttgttttcttcaagaagcttaaagatgttgactcactttctttctggcctccattgtttctgatgagaagtcagcttaatttgatcattattcctctgtatgaagtgtgtctttcttctctggctgctttctttggggtttgtttgtttgtttgtttgttttgttttgtttttgagatgaagtttttgctctgttgcccaggctagagtgcagtggtgcgatctcggctcactgcaacctccgcctcctgattctcctgcctcagcctccaagtagctgggattgcaggtgcccgccaccacgcccaactaatttttagtagagacaggatttcaccatgttggccaggctggtctcgaactcttgacctcaggtgatccacccacctcgggctcccaaagtgctaggattacaggcgtgagccactgtgcccaggcctctggctgttttcaagctgttgatttctttcctttatctttaggtttcagcagttggactatgatgtgcttcagtctcattttcttcttatttatccttcttcatgttcattgagcttccatggactatgaatttaccttttcagcaaatttgcaaaattgtcagccattacgtgttatatgtgccattctttctcactaatgacctgtatgttagaaagtttgctgttgtctttcaagtgactgcagctttgcggttttttataatcttttttttctttgcccttcaaattgggtaatttctgttgacctgtccttgatttccctgactcttccactgactccagacttctgtaagttgatccatgaagtttttttttgtttaggatattatattttaaaattctaaaatttgcacttgactcttgttcatagatttgtctctcgagactcccctctgtttacgatttactgacgccgcttttgtttcggtgtttgcacgtacctgcaattgctgcattaaagtctcgtttgctcattttggcatctgagccggcaagcgtccagggtgtctgagggatgattttctcttggccatgggtcacattttcctatttctttgcatgtctattttttattgtagactaagattatgaataacacctaggagagacattggattttgttatcatcctctgaagagtgttaattttgctccagcagtcagttccgttactcactgatcatctgaacttcgtgcagcctggttttatgctttgttggggtagatctctagactgacccttctgtggttttagtaggaagcctgaggtatttatcaagcctctctaactcgactacatttaaactccaaactttgtctcctccacagcaggagctgaaacctctgccacactaggcccacaaacatgcgtcattcagggatccaccaaggaacagggtagtttatacagaatttgggtcccactgccatggcttcctcctttgggaactctcctttccatttccatcctctctgacaacctaaaactgtgtcatctgacgcttcaacctggaactttctgcttaagttttagccatctacattataagggcactttatagcaagaaatagaatattattccattctaggccaagtacagtggctcacacctgacatctcagcactttgggaggccgaggtgggtggatcaactgaggtcaggagtttgaaaccagcctggccaacatggtgaaatcctgtctcttctaaaaaaaattttgaaaaaattagccgggtgtggtggtgcatacctgtaatcccagctactcaggagctgaggcaggagaatcccttgaacctgggagccagaggttgcagtgagccgagatggcgccactgccctccagcctgggtgacagagtgagagtctgtctcaaaaaaaaaaaaaaaaaaaaaagaaatattccttcgttcttttataggagcatagtacttcattttgtagatgtactattgtgtatcctactgatagatacttgtgttgcttccagtcttgtttttacagcgatcagatggttcttcttaatttctcttgctacaaatgttgctgctgtgtacaacctgttaaagtccacagatggaataaaagctttggtttgcaaaaatgactcaatctttacaaacattctgtcatttgtaccataatcaattagtttattggatcaccgaattgcctgacagaatccttcctggaactagtctatggggtcatttggcatagagtcaaagcctcagacacgatgagccagagttgatttcctttggcttcacataattaaactttcccagaggattatcaggttacagtgacacacacacaggctgtcagataatggacaaagtcccagcagcgtgtacaaccagctggtggctcccaaattcaaattcccccagcggcatccgttcggttattcgtacccacaccctcccttagaagtttacccctccgccaggcgcagtgactcacgcctgtaatcccagcactttgggaggccaaggcgggcggatcacctgaggttgggagttcgagaccagcctgaccaacatggagaaaccccgtctctactaaaaatacaaaaattagccgggcatggtcacgcatgcctgtaatcccagctactcgggaggctgaggcaggagaatcgcttgaacctgggaggcggaggttgcggtgagccgagatcatgccattgcactccagcctgggcaacaagagcaaaactccatctcaataaataaataaataagttcaccccactacgggcaagaagccacacagaaagaaaaataaaataggtatctctggggttttctgaagggaaagtaagtgcagctctgtcccgtctttgcagctctaaataggaacatggtggagtagggcaggtcgggcttgacgatgtcatgacttggcctctctcagtgtcacgcagcccctgcaggttataaggaggattgagctggccaggcacagtggctcatacctgtaatcccagcactttgggaggccgaggtgggcggatcacctgaggtcgggagttcgagaccagcctggccaacgtggagaaaccccatgtctactaaaaatacaaaattagcccggcgtggtggtgcatgtctgttaacccagctgctcgggaggctgaggcaggagaattgcttgaacccgggaggcggaggttgcagtgagctgagatttcgccattgcattccagcctgggtaacaagagcgaaactccgtctcaaaaaaaaaaagaaggatagagctaacatgcatgaaccacctagaacagcacccagagcatagtaacagctccttgcagatgttacagtaccttgatctatacaacagtaaagggaaatgcatgctagctgccccagatgctgccagcttcacaggcatttttctgcctgcaaactaatcctaaggaagagaggagggcagggggagaaattgcacccagtcaaatgtaaacgatacaaaatgtgaaattcccctctctgaaaatgaaagggaaaaaactcgattcaatgcctgcccctgaggtgaacctgaaatgacaaggcagacactctctagaacttcacgtttggccaccagggtcttcggttgattttcctttcttcgtcatatctgagtggctgaaacgccagtgatctgggatagtcctttggctgctgatagacttatgcaatcccttggcaggcaggacaggccagaggaagggctcctgtgcctttaaggtcactgttaatcatgtaactttattgtgttcctgggctataaaggaaatgtcgtccttgatctgaatgtctgttttatgatgtccataaacagtgaattgccagtgactgtaccctgagtgagaacatcctcagccagttgaatagttcaagggcagttgcaggggtcaggagagagcaaaagtgggacagaagatgagtttgcttcccaggaagagagacagtgccaccccacccctcgctgacagggaagccttccagcccttcctccaaagagccttggctctcaggggttggaggttggacaagagcagaaataaaggcaccctgctcccaccccccacaatcttccggacgtctagagtgcttatctctttgggggcaagtaatgtgaattattttccctaatgcaaaaataaaaaataagagaccccttttacccttttctgaaaggatagcagaggtatttttcttttcttttttttttttgagatggaatcttgctctgtcaccaggctggagtgcagtggcacaatctcagctcactgcaacctccgactccctggttcaagtgattctcctgcctcagcctcccgagtagctgggattacaggcacgtaccaccatgcccagctaatttttttgtatttttagtagagacggagtttcaccatgttggccaggatggtcttgaacttctgacctcatgatccgcccacctcagcctccagaagtgctgagattacaggcgtgagccaccatgcccgtccagcagaggtattttttctaatacttgagaagtgtctgctaagtatgtattcaccggagggtgctcagcacctcgccctgttgctctgggttgggactaacaaggtgaaacatggctcattgcatcatattaatagcatgcaaatctaagcccagtgatgccgtgcaatggctacgatcaagggcaatagaatggatcgtgcatgagctcccaggccacacacacacgcccttgtgatgtattattccctctactcttgcaggtcggtgcttgggatgctagtgcccaagctgatgttcctaggtcacctccctcaatgcatgggtctaggggccagcatgttctattgctagggccatgtgtgcattcgtttgcctaggggagaaaagtacacattcccatcagctcaggtgcgtggaggacggaagaactgctgttgctgctagtattctcttcagcacaagataaaaaggagataggcaaatcagctggctggccaatcaaattaacttattgttacactaatttttagaatcagaattatgggtcaggctgtgctagcaatcagtgaaatcaaatttcatgtcattctgcactgggtagactcaggatttgcctgaaacaagtaaacaattcctggaagaagtgggcgaggcagaggcttgaactatccactcagaccaaggaggagtcaggcaatggcttctgggcatcgtgtggggtgggggcagcccctgccctggacacccgtgaacacggaggcagccgtgtgaacaccatgaggcagggtgtccatcctgccacccacacagctgcgtcctgcccaggaatgaggctggcagcccataggcccctccttggtccctctagaggtttgcttcattccagtacccttggttctgtcaagtgggcagggcctgggcccctctgctgcaaacccatggcccaaagcggacctgatccggcagcatctaaaaacaggacccggagaatctgctggactccaggattgccctggaacaaacctaaagtctcctatgacatgcaaacaattctgccagccccggccagcattccctgcatgtgcttatcaagtgaggaggccagcaggacttagcacccaggtgagcacacttcattgagtccaggtgtgtgcagatgagaagcagccaggagttgaggctgaagaggagcctacctaaacctgtcattacaactgattgatccttggtgtagtcaaatcttctgcctttatgaaagtcatggtatctagaggtaaatccccatcagcttggagcagcaccatgaaatccactctagcatgcagactcgggggcacttttagatattctattggttgttcttgggggacagcttcctttggagaacatgtgagttgtctgtgaatatcagcttgctctccctaggtttccatcacatggatcagcgagagttaatgctgactccccctccctcgggggcttatttgcaatctcccgatttgctcaaaaacttccaggtccagagggaccctaaagaccctgtcatgtccccctgtgaattaccagcatcccaggccattgctgggttttcttaaaactattaagacactatcaacgtgaaatgacttgaataggctttaatttttaaaattcattatacgtcctgcagcatttaggaaaaagagggaggtgtcacacataatatcaaatttggctgacacaaggtgattttgccacgaaggttgggaaggatgaacatttgcaattgaaaactgtttgttgcccccagaatccagcggtttcaggctctctgaggattccagaggtgctagagggggtaaggccacattcaggtggtgcaggtgggattcaccccttcacagcctggaggtggtgcccggagcgcaccctgtcaccccaaggatgatgacaccccagggaaggtggtggaagcaggaaggggaggtcagaggaaaactggggccctcagtgggcatccgtgatgcggaaacactaataatgccaacagcaatagcagaggcaggcagggcttacgtggccagggctgggctggtgctgtcctgagcacttgacatgcatgaaatcacagttgttttaagttctgaactcccctgggaggaaactgtggccacagcaggaattccaatgattctagggtcaggagaggaggcacccacttcctgatcagggctctgtttgtggatgcgtgggtgtggttggcctttgtgcacactggtggttttgcttctttcccccagcaaaagaatgcagattttgcattatctaaagaggcggttccgtgagcccactgtgctgagtcacatatattccatcggtgtaagtaccaccacctgggcagtgcccctggagtgttctcactgggagcgcagctttgtgtctgtacccttcctgagaatagctgacatgctggcctgggtggcgcattggccgaggtgtggctatgacagaccaggataccagcatctgccccagcactgaactgagcacaccacagaaggtgtggacagagtggcatgaaacatgacagctgcttgtgctcgaaattagatgtagccacacaaatcctgtcgtgctcaaagggttccatctccaaagtccaaaggaaaactcttccttaactgttattccattctgtctatacatttcttattttgaagcaaggataggttcacacgctgctgtaatgatgcatgcagagaaagcccactcatggcccggtttctcccagtggtgacatcttgcaaaactctagcacaatgtcacagcctggcattgaccgtgacacggtccagatccggaacatggcgtcccccacaaggatcccacctgccgctctttaatagccacgctgcttcccttccattccccactggatccctgtcccctggcaaccaagaggtctctctcttttttgtttttgtttttgttttttttttgagacagagtttcgctcttgttgcccaggctggagtgcaatggcacaatctcggctcaccccacaacctccgcctccagggttcaagcgattctcctgcctcagtctcctgagtaggtgtgattacaggcatgcaccatcatgcctggctaattttgtattttcagtacagacggggtttctccatgttggtcaggctggtctcgaactcctgacctctggtgatccacccacctcagcctcccatagtgctgggattacaggcatgatccaccatgcccggcctctggtctctatttgtatgatgttgtcaattctgtaacgttctacacatgtaatcatgcagtaggtgactttgggattggcgccttccacccagcacaaccccctggcatccatccgggttgtcgcctatatccgtggttcattcccttctttctgagtcatactccgcggtatggatggaccacggttggttcaaccattctcccttgaaaggcatctgcatcgtttgcatttgggactactacaaatacatccgccaggaacatgtggacaggcctttgtgtgaacatcagttctccgcgtacatcatctctctgccctggtgcttgcatctttagttggttttttctgtcttttgaagaacctaccagactgttttcagaatgactgtaccatttttcattcccaccagccacgagtgagtgagccgtgtttccacgggggttggcattattttgtatcccagccattttgataggtgtgcagtggtgtctcactgtggttgtaactggcatttcctaatggccgagtggctctcagcatctcttcatgggcttctttccatctgtgactttctccagtacccatctgctcatctcttgcccgctttcaagttggctggttttgttttctaccattgagttttgaccattctttatacatgctatctgcaagtctttgtcagatacgtgtcttgcaaatattttctgccacaccgtagcttgtcttgtcatcctcttaccaggatctttctctgagcgaaaattttcattttgatgaagtccagtctatccatttttctttttctggtttgtgtttttgctgtcaagtctaagaactccccaccttaccgaagaccctgaagatttctcctatcttctctctgtgttttatagtttcatgttttacatctgtggtccactttgcattgatttttatataaactgaattctaggtcaaggctctttttcttgttggcctgcggatatctaatttttccaacactactgaaacactatttccaacactattactgaatgccaccacgcctggccatatatatatatatatatatatatatatatatttttttttttttttttgtagagatggagatctctctttgttccccggctggtctcaaactcctgggctcaagcaatcctccaacctcgacctcccaaagtgctgggattacaggcatgcgccactgtgtgtggctggtattttatttataatttcagtgtctacatggtcattgctaagctttcttttctctgttgaattgcttttacatctgggtcaaaaatcagttgggcgtatttgtatggacatggtcataggccctctgtttctttccattgctctacctgtctgtctttctgccagtacctcacagtcttgattaccgaaattatgtcataagtctcaaaaataagataggctgattcctctcattttgtctgttgtttttcaaaattgtttttattcttgtgaatcctttccctatctaaatgttagaataatctctatttctacaaaaaaaaaaaaaaaaaaaaaaagtcttgctaggctttcaatgggaattgtgtaaaacttgtttacctatgtggggagaatttactatgttgagtcttccaacccattaacatggtcagtcttgccatttgtttatatcttctttgatttctttcatgaatgttttgtagttttcaacatacaacttctgcatatgttttgtcagtttgacacctaggggcatttttgagtgactgtaaatggtactggtgtttgtttgtttgtttttgagacagggtctttgtccctgaggctggagtgcagtggcatgatcgtggctcactacagcctcaacctcccaagctcaagcaatcctcccacctcagcctcctgagtagctggaaccacaggcacatgccaccacgcctggctattttttttttttttttttttttttgtagagatggagatctctctttgttccccaggctggtctcaaactcctgggctcaagcaaccctccaacctcgacctcccaaagtgctgggattacaggcatgtgccactatgtgtggctggtattttatttataatttcagtgtctacatgatcattgctagtatatacaattgtagtaaatacaattgaattttgtatgctttccaccctgcaaacttgctaaactcgcttcttagttctaggagggttgtgtttttttgttgttgttgtttgtagattcattggggttttctatgtagacaacatgtcattggcaaacaaggacagttttctttcttcctttctaatctgtttgccttttatttccttctcttgcctattgcactggctaggactcccagcactatgttaattagcagcagtgagagcagacagctttgccttgtgacagtcttagacaccaagcactgagtttttcaccattaagtacagttggctcttctgtatctgtgtgttccatatccatatatccaaccaaccgctgatcagaaatgttttaaaaacaagaaaaacaatacaaattagtaaacagtacagtatagcaactctttacataacatttacattgtattaggtattctaagtaatctagagatgatgtagcgtgtacgggaggatgtgcataggttatatgcaaatactataccatcttatataaggaatttgagcatccttggattttggcatccttgtggggagtcctggaaccaatccctcagagacaccaaggaacaactgtataatattggctgtaaggttatggttgatgcttttaatcaacttgaagaagttctcctccattcctaattttatgagagttttctcatgaacatgtgttgaattttgtcagatgttttttatgaattagttaatatgatcatgtaatttttcttctttagcctgttgattggagactacattgattggttcccaaatattgagccaaccttatatccccagaataaaccccactaaatcttgatatgcaattatttttatctattactgaattctacttgctatttcattagtgatttttgtatctatattcatgagggatgttggcatgtagttttctttttgttgtttttccttgtctgcatttggtatcagggtaataccaacttcataaaatgaatggggcccaggtgcagtggctcacacctgtaatcccagcactttgggaggccaaggcaggcagatcacttgaggccaggagttcaagaccagcctggctaacatgctaaaaccccggctctactaaaaatacaaaaaattagcctggcttagtggcgggcacctataatcccagctactcaggaggctgaggcagagaatcacttgagcccaggaggcggaggctgcagagagctgggatcataccactgcactccagcttgggggacagagtgagactcagtctcaaaaaaaaaaaaaaaaaagaatggtagtgttccctcctcttctgttttcttgaagatattgttagaatcatgttgactttttaaacatttggtagaattctctataaatgtttagaaccatcttggcctggacatttcgttttggggagtttttaaattacaaattgacttttgctataggttgtttaaattacctgtttgatattgaatgagttgtagtacctcatgcttctctaggagttggtccattttattgaagatgtcagagttatgtgtgtagaggcatttgtagtgttcccgtattatccttttgatgtctgcagggtctgtagtgatgttccctctttcattcctgatattgacagtctgtgtcttccctctaattgtttctttgtcagtcttgctagaagtttgacaatttcttattttcaaatacctagctctgttttgttgattttctgcattgtttttctgttttctgttaccgggatttctattcccctatctttgtgatttccctccttccttcctttgctatcattgtgggtttactttgctcttcttttcctgggtgctcatggtgggatcttggcttattgagttgagatttttcctctcttcaaatgaaagcccatagtgctataaatttccctctcagcattgctttagtcatgtcccacagctaagttttgtgttgtattttcatttttattgagttcaatgtctttttaattttcccttgagacttcctctttgacccttaagttatttagaagtgtgttgttaagtttccacgtgtttggagatttgtctgctatctttctgttattgatttctactttgatcctcgtgtggtcagaggacatgctctgtatagcctcagttcctttagattgggtgagatttcctgtatagcccaggatatggtcaatcttggtacatgctctgtaggtgcctgaaatgaacatagcactctgctgctgttgggtgaagtggtctgtaaatattcatcatttgatggacttctaaatttatctcaagactctgagatcatttactctcaaaggttatgtgatacgctaccttttccagacaattcctaagtgatctaaacccctgctgagttcaccaagtggcctgtaaaaccctatgatgattcttgttgatgggagccatcttcccccactagtaggtgtgggcctttcttaaggtgagggccttgagctcgcaccagttcaacctatggctgtatgaaaattttctggctgacatttttacgcttgtaccttcaagaaatataacaaaacatcatttttcttcttcttatcaagtcatagaatgctaaaggcagcgggaatctagggtgatctggtctaccctctcgtttgacaggtgaagcaatgaggtgttgcgaagttaaactgattagttttttttaattttttaaatgaaattaatatacgttaattatagaaaatgcataagaaaaaggggaaatgcataagatagagggaagcaaacatttttaaataaaatttatataaaacttataaccaaagatgactactatttttattttggagtatactctcccaatatgttttcaaaagcaggatcactctctatgactgctttaaaatcttttttttgtactttaacaacagacatgaacatttttcaaaatattatttctaatagcaaaatatcattccagatatatgtctgatgatacagttttctcatcatttatttaatgagtctccattgggtgggcgtgcaggttgtgacagttttctctgtgttaaataacactgtgatgaatatcttttgtgtacatgcatgatgatttcctagaaatgggaccctgggtcagtgcttgtgaacatttttagcttctgagccccattgccaagttggattcttgaaattttttgtttgtttgggcagctttggttttgtttttttgttttcttttgagatggagtttcgctcttgttccccaggctggagtgcaatggcacgatctcagctcaccgcaacctctgcctcccaggttcaagtgattctcctgcctcagcctcccgagtacctgggattacaggcatgcaccaccatgcctggctaattttgtattttttagtagagacggggtttctccatgttggtcaggctggtctcgaactcccgacctcaggtgatctgcctgcctcggcctcccaaagtgctgggattacaggcgtgagccactgcgcccagcgcagctttggttttatttgttttgtttatagtggagggttagacatgaaatcaacatagaagatgacgtaaacttatgactaagcctggtgtgggctctcggtgttctggggcatgagctagaggatggctggagccaggtagagaccgctcccttccttagaatgtcaccttgctgacaaggacagcgctgtgagcatccacaccttcctgtgaggtatctggcattgagcctggtcaggaaacaggaagacaagcaggttccattgagcctgggacctggaccttgtaaagccagccacccagcccagttttacaggccaggcaacaaagggagcaaccggctggacccaggcctgcctcccccgtgcagacccgccgtgagaacaccgtgttctgaattgagacgtgccttgcactcactttgtcccagtaattgcccccataaaatagacctggacactaagaggaaacttcccatatttggaaacccagtcctgcctgctttttatagctggtgtcgaggacaagagaaccacaagccgtggccagtctgctgagagaccactgagggacagacgggttgtgggcctggagcagccccggagggaaggagcatttgaaagtggacaggtagagcccaggcccagagagccccagggctgctaccaggaaggccagcgcatccctccaggtaacgggcagctcctcggccacagcctccaccccccaacacgtgggattcgggctgcaatggcctacacatcttttcctcttgtccgtgttccatctgtctttcttctttggtttgtagagagagaagaattaatccagagcgtgctggcgcaggttgcagagcagttctcaaggtacagagtcttctaaacttacaaccagccagagatgggcacatctttctctaagagcgagggcaggccccaggctctgaggctggccttggccggcaagcgtggctgtctcacctgcctggaggagctgcccgcacggtggaagccttctgtggcttctgtaactaagccagcttggatggggcccaggaaacgctcaccttagaccaaagaccatgttgagtgggtgcattagaatgtgagctcgtgaggtcgagaatgttctccaccggctcttctgggatgggagaacaagctataagaattggctccactggaaaataagcttcctcgctgagcttctgtgtagttaggagacttccttttcatcggagtcatcccaacaatcctgacctggataccgtattttccatttctcaaactgacttctctgtggcgtcttactgcccaggttaattaaaatagtgaaaagcacagacgggtgggattttttaaaaacctttgaattggccgggtgcggtggctcacgcctgtaatcccagcactttgggaggcggaggcgggcagatcacctgaggtcgggagttcaagaccagcctgaccaacatggagaaaccccgtctctacgaaaaatacaaaattagccgggcgtggtggcacatgcctgtaatcccagctacccgggaggctgaggcaggagaatcacttgaacccgggaggtggaggttgccgtgagccgagatcacgccactgcactccagcctgggcaagagtgacactctgtctcaaaaaacaaaacaaaacaaaaaaacctttgaattgtttaactgactgggttggagcctccagagagcacaacaggtcctccgaaggtgtctgtgcccatcaggggaaggtgcggggactggaccatctcaactgcatgagcagagagagggccatgtgtccaccccagagagcttgggtccactgctcaggcccgaagaagtaaatatgcccaaccagcccagaaaatacacctcatgatactttggtgattctttcctccccatgggacatgatgatttctgaaaagcaagtcctagcatgttggcacctcagaccctcaccagcccacctagaggccttgcccatgcccacagcagggactcagtaggtgtttgcttaaccggttttggctctgagaattttaagggtcatatttactctctcttttctttttcattcctagagcattcaaaatcaatgaactgaaagctgaagttgcaaatcacttggctgtcctagagaaacgcgtggaatgtgagtgacgtttctgtttcctttttgcttctctgtcctttaacctctattcaaattaaccacttggaacggggaggagttcagtgccgaaggtaaatacaaataaatgtcttttctttgtgaaatacttgaaaattacctttgatgttaacaaaggctagcacagtgactaactaagcattttatttctattttaaaagaagcacagctcatggtataaagcattctttcagccccaaagaataaaaatgaacacacgaagccttccgcacttagcccctctgagaacctctgctgagtgtcttgtctgtgtctttttgtgtgtaaatgaagacattctctgcacactgatcggcaccctgtgggtcataattttttggaatatgtctactaagttgttatctcttggtttctgatacagtctggatgtcccctccacatctcacgttgaaatgtcattcgcaatgttggaggtggggctggtgggaggtgtttgggtcaccaggcagatgcctcctaaatggcttggtgctctccttgagatagtgagttctcgcaagatctggttgtttaaaagcacgtggcatctctctaccctcctgcttctccgttgccttccaccatgattggaggcttctcgaggcctccccaagagccaagcagatgccggcaccaggcttcctgtaaagcccacagaactgggagccaatcaaacctcttttgcttataaattgcccagcctcaggtatctctttatagcaacagaagaacagcctactacagcctccaatcaccaccaaaggaaaagcagaaaaaggactagggagccaaggagtgtcgattcaagtcctgattcaatgatcacaaagctcaaattctgggaagaaaacagcttcaagtcacccaccctttttgtcctcatccataatatcaagatcaatgcttgaattccataggcctcacaattctgtgttccactcacagcttgacaagtgaactctttgtcaatgacaaggcaaaggttaatgattaacaggcactgtatttaccaacttaggaactaaataaacagaatccagacaggataccattaagagttgcagcatcaccaaaaatatctggctgattgactgaatgtcgtcgcttttctttttctttttttgagagacagagtcttgctctgttgtccaggctggagtgcaatagcacaatcttggctcaatgcaaccttcgcctcctgggttcaagtgattctcctgaaacatgatttacatagtcagatttatacttttcaaagtgtgttgacatttctaaaaatgtatgtggtcactggatcttcaagacagtttcattttccccattgtcaacgaggaagccacagagaggttaggtaacctcaagttcactcagcaaattagaaaaataaataaagctgggactggcacccagggtcctggccgggctgctgtcacggcctgctacctgcccttctggaacgagtcacttccctgcacacctggctgaagaggaccaggcactccatgaggattccttgataacgcaggttagaaagctaaagctgcaagcaacagaaactgatcgtggctgctttcaacagaaaaggagtttttccctaaaggattttgggaagcttccccagatccccaggaaggcttgggaacagggctcagaggttgtgcagcagcaacaattccccaaatcccgtgcagagctgatgctgtgcggatgcctgtgctgccgtctctgagccccagatgcggcaccagctcccctgtactcctcactctggacctaggtcccccggaggctccacaaccacttatgcagatatcaggctgcttctccatgtcactggctacaggttcaaaatctagacagagccaggccgcgcacccaaggtctagctgcaaggcaggccccacgaagggaggctgtgagtatcctgaagctgcctcacaaagcaccacagactgggaggcttaagcatcaaaaactgactctttcacagctctgcaggccagaagtcagaaatcaaggcatgagcatgactggctatttctggaggctctgaggggccctggttccatgcctgtctcctagaaccttgtggttcccagcaatccttaccgttcctgagcttggaaggctacattgctataatctctgcctgtgtctacacgtgatgacattctcccaggatgtctccatgtcaacagtctctctcagctaggtcttataaagatgcctctctttgaatttagggcccaacctaaatccaggatgggcccatctccagatccctaatggattatatctgccaaggacctttttctacataaggtcccattcacaagttccagggagtaggttgtgaacagatctttctggaggacacaattcaacccaccacagcgagtgtttgcatttccatattctgcactgggaggctggctcagctctccaccaagccccatgtcgcagggaattctccaaacttgggtaggggtttgagccaaagcatgcaaaaaaggcttgctgcagagtccccacccctctttacggacacaaaaagccacgcagtcactacggggcgagtgtgcagatgcccgcgggcagcaggtgcctcccacctctcctcctctctccagcacctgggtttttcctcagccttccccatctcctacgccccacctggaagccagtgccagctccccccatgctcttcccggaaagtgcaaacaggcaagttgaagaggccatgtcgtaactctcaaaactcttacagagaattatgtcgcccacaacaagatgaatagtaaccctgtgtgtctttgaataactgaccctggaaaataaccatcaagccagaagaaaagtgttcctattttacctgcaagtggcaggtgagtcgaagaccactgaaggaaatggcccataggaccttcccccctagcctgttctggctgcggaattctccaaaatttctcacttctcagagggaagcatcttcccataaaaccctcagtaaatgcacatagatggcctggaaaaggacaccgctcttgacccaccgagctcaggctcactgcactgaccaaaattcctggcgcttctatgggtaaaaccggttgtgactagttgtactgatttctagcaccagagacctaggactgcagaaatgggattgagggagctcacctctctaaggagtagagaaggaggaacagtctaggagttgtggagggtaagggaggggcttgggtgaggtcaggggggactctcctcagtcctcctggctgccctcctcccctggcatgcaactcacacccccaccccaggaggcagccatgtccagacaggctgtcctcctcctgaactccacctggctttgggctcatcctccccgggcacttctggctgatggctccccactctccagcggatgtgctttagcgggaggtggccaggatgctgcacctgtgctgagccccagagattctgagttccagagacactacaagggcagcagagccttaacccaaagatgcaagagcccagacattttaggaagcttggagggcagaaacggaaagtccttttgaggagagggcctgcagctgaacctctcacgcaggccactgggtaggtgcgcgcccagcttctcagaaggtcagtcccaaccctgcacggctgccagaagctagccagatggggaaggcggccaggagcctggtccgacaccccgatgcacagggcctgggccagaggcagatgctcccatctacatatgcacacacacatataaacacaaacagagaaaggtgcacatgcactcacatatacacatgtgaaatcacacaggcatgtcaggatgtcacatatacatgcacacgtgtaagcacccaggcacgtgcagatacattcatatatatgatcacatacccacacatgcgcacacacagctgcttctgctatacatgagctgctgtgagctgttttgttttgtcttgtcttgtttttgttgttgtttgagacggagttttgctctttggcccaggctagagagaagtggcgtgatcttggctcactgcaacctctgccccccgaagacaggacacttctgtctcagcctcccaagtagctgggattatagctgcccgccaccatgtccggctaatttttgtatttttagtagagatggggttccgccatgttggccaggctggtctcgaactcctgacctcaggtgatcgacccgcctcggcctcccaaagtgctgagattacaggcgtgagccattgtgcccggccaagctgttttctgcctcttgagttaaaggattcatccactagaactggccaccttaaggccatattatattgtggtggacttgtcttaaatggaatttcctgcttcttcttaaatgtataattcctctgaattgaatataaatttcttcatttctcctcattgactttcaaagctcttcttccttttgatatacaaagtttagccttgttcgagagatctgggatttcccttacgttacggattattttgtaaacagaacacccaggctcctcccctcatgtcctggctggaggtgaaacattaaaaagagattttaaagcagggccctttactcccttccttcctggtttgtggccagggcacagggcagctctgctccatccaccctttgtccctgtgctctgggcttggaccaaaacctaaacacagcgtgggccgtggcaggagctgaccggctggggcaaagtttaacacaggccatacaaacagcccagagcctggatgctagaaccaagccttgcttttctctgtcactccggaagtgtgctctacgcgggctctttagtgaggctcctggaggaagtgttgaaacacaactctattcatacatgtctttaaacagctttcactagctctgtagccaaaggactgggcctgccaggttcccggcctcttgctggagcacagtgaggctggggaaggagcacagcacagagcctcctgagcctcggctcagctctccccgacccccagctcggctctccccaccctccggctcggctctctctgacccccagctcagctcttccccacctgccaggacgatttccccaaagccagcgtctgtcagaaaatcacccttagtttttcctgcaggtggcctgtgacttgtagaagctcacaaaaatctctttcaaagcccttttttgttgctgttttgttttgttttgagacagagtctcactttaatgcagtggagtgcagtggtgtgatcttggcccactgcaacctccacctcccgggttcaagtgattctcccgcctcagcccccagagtagctggaattacaggcagcctgtgaccacgcctggctaatttttgtatttttagtggagacggggtttcattatgttggctggacaagctggtctcaaactcctgacctcaggtgatccacctgccttggcctcccaaagtgctgggattataggcatgagccactgcgcccggcctacagtccttttaagaggacagcccggggtttccagataatactagccccacacacaggcatgtcctagggtccacacctggtcagcgggaataacaggcagccgtgggctgggctcccagccccctagcagggtccagtgggccagggagcctctgctttggtttgtggtgcgtggtctgtgcccgcctgtgttcagcgtttgaaggcagaggagcgggccatgatgggcagagccgacgtccaggctccacggtagggccgtcctgctgctgtctgcagacctctcaggcttgaggccccccgccccacaggactggcccgctcctccctctggattgaggtggagcagggctggcagtgggtcgaagaggggagctgtggaatcttccccaaagcagccgggtgtcctggaaaggccagggagtgaggaggcaggacccccggggacacaggcacacacatccaccacatgctcacctctgcctcctcctgcagacctccccgccagccccgtcatttcatggcatcttgctttctcttcattgaggaatgcacttttgcaatgttgttactcactatccatctacttggccaacagcctcttcataaacttaattgccacaaattctgcatctctgggatgcaaactagtgaagctgtgctgtgtcacccaggaggcttaattttaacatcacctcaataggtagccagggaagcggatctcggtggactctgcactgtcaatacaaacgctatgcacccatcaaaaaccatgagctggcttaaaacagagccttgtatggacatgggaaaaaaattataggtttgttgcaaactcatttagcagcaaaaatgtgatctgaactgacatgaagcccttggtatttatttatcctgctcagtatgataaatagcattttcctcgggggataaaaagaaaaacgtgagctgcgacagcagccactaacatggggaagggccgtgacctcctgatgagtgaaaatagcaagttagaaaacaacaaattttatcttttaaaattaataatagatatatagatacatagacacacacaggatggatagaagctagatagatacatacatacatagatacatacatagatagatactatatagatatgtaaatagaaagataggtagaggctgggtgcagtggctcatgcctaaagtggttccccagcactttgggaggtgaaggcaggaggattgctttagcccaggagttcaagaccatcctgggcaacatggcaaaaccccatctctacaaaaaatacaaaaattagccaggtgtggcggtgcacccctttagaccctgttattcaggaggctgaagtggcaggatcacttgaacctaggaggtaaaggttgcagtgagctgtgattgttccactgcactccagcctgggtgacagggcaagcccctgtctcaaaaaaaaaaaaagaaaagaaaagaaagataggtagatacatagaatgggtggatagagagatagaacggatagaaaaataggatggataaatagaacataggtagatacataaatatgatgaatgcatagatggatgggtggatggatggatggatggatggatggatggatggatggatgaatggatacatagatgaatggatggatagatagtatataaatggatggatggatagatacacagtaggtaggtaggtagtagatagatagatagatagatagatagatagatagatagatagataaacaggatagatagatagatagatagatagatagatagatagatagataaacaggatgaatatttagaaggctgggagtgggcagaaagcctggaaggacacacattaatacaaataatattaactgagttgttttctgggcccataggatcctagacaagtttttaaatattattctttgaagtgctatttcctacacttcctacaatgataataggatattttatattcagaaaaatgacatttaagacatagtcaatggtccatggaccttggacagagggcccagctgccctgtttgcagtctacaccgcatgcccaacccttccccagatctactcactttcagaatgtgctgccttccacgtgtgaaccagactgagctcctttctgccactgatgttgaattgtccatttgctcacgtcagtgtccacgtggcaaatccacagggcatgggtgggatcctgcagtctagacaaagccaaggagcaccgctggaggccacgttgggcttcccaatccacatgcaaacccaaaatgtgttcttgggtaccttttctgagaagacagcctgtggcatgcatcagcttccttgaggggcccatgatgctggagaaaacggagacccggctccaaaggagaatgtggactcttagtggttggacaaagacgtcccgacctcagacctcaggtaccctgtgtttccccagcggcagctcatctggactcggccatcacgacagcgaccacactggctccagccacatgcacttccggaccccatgtcctctagctgttgggtagaagaggggtggagaaggtttctgtagcacagaaacacatcagcaggaccagatccaaatattgcactctccagattcttcgtccttctggcagaaagaagcagtgtcccgggaacatgcccctacttgacccctgaccctggaaacgcctcgaaacccacccgggaggctgattccagctagtctgccctgggccactgtactgggagagtttctttccggagctgcagtacttcctttggggtgggaaggagttgttacaaactagccaaaggctctgagttgcttggtttttcctttagaaaacatttgctttttatttttagcagttattcagagccaaacttcatgaaaaggggaatagagtggtatcgtgggagtatccttttgcataaaaactaaggtgtgattacaaagtaacaaagctaatcttttttatttcaattggtttatgaaccaactctaattgaaaagccgtgcaaagctgcttgcttcatggcagcttttctggggtaaacgtgcagtcagccaagggtaaatatcttgaagtttaacgctcgctcggaggcataagctccagtttgtttttggttgaaaaatagtatcctaactgttgaggtacacctttgcagtgggactctgtaactgcccaaggggttcaccctgcctgctacctaaacagagctcattcatcaagacaggggaactgcaatggagaaagagccattcacccagtgccggctgtgcgggagaccagagttttattattcctcaaatcagtctccccgagcattcggggcgcagagtttttaaggataacttagtgggtggtgggaagccagtgagccaggaatgctgattgattggtcagggaggaaatcatagggagttgaagctgtctgcttttttttttttttttttttttttttgagacagagtctcactctgtcccccaggccagagtacagtggcgtgatctcggctcactgcaacctccgcctcccgggttcaagctattctcctgcctcagcctcccgagtagctgggactacaggcactggcacaccatgcccggctaatttttgtatttttagtagagacagggtttcactatattggccaggctggtcttgaactcctgacctcgtgatctgcccacctcagcctcccaaagtgctgggattacaggcgtgagccactgtgcctggctgcagctgtcttcttgcactgagtcagttcctgactggggccagaagaccagacgagccagtttatctatctgggtggtgccagctgatccatcaactgcagggtctccaaaatatctcaagcgctgatcttaggagcaatttagggagggtcagaatctcgtagtctccagctgcgtgactcttaaactgtaatttctaatcctgtggctgttagtctcgtccccaggcaagaagcaggtctgctttgggaaagggctgttacagtctttgtctaaactataaactacaaatgaagtttctcccaaagttagttcagccaaggaatgaacacagacagcttggaggttcgaagcaagatggagcccgctaagttagatctctttcactgtctcagtcataatttggccaaggcagtttcaactccaggaatgtgatcaagtccaagttctgctgatcctcaactttgcctatttatttctcttctgttttaagtcaacactttctcctggtgaaactgctctggaaggacgttccaatgaaaagcttttcccataatgagatcgtaatccttgctgaaaacgctttgccgttcactgcattttaatgctctggcaccacatgtgcccccttttctttttgggataaaagacgcctttgtcccatgtcctcagctggtgcttaggggtatggagcaaaaagtgggtgccagagttgagattcagggagtggagagtggggaggagcttctgccttctgaaaactgcccggatggatgcggtagtgcagcggtggccacggcacatgcctgcgaggatagagtcagttgtggctgagctaagcgcggaagtgcaggcaaaacctgagtatcggcagccagggcaggtgtggggacctctgcactgaggtatattcctccctgggagccacagggagcccttagttaccagccttgagagatcctccacattcgtccgtggtaacccccttgctgtctctctctctgtcaccagtggaaggactaaaagtggtggagattgagaaatgcaagagtgacattaagaagatgagggaggagctggcggccagaagcagcaggtagggtctgcgctggggccacgggcggccgggcctggggagggctccccgtaccagttgggctggggctgtgggctttgtttgcctaaaagaaaggctggtgcagttcggtacagttcaggcttgggagagtgcagtctggaggcagccaccctgcttgcgacctgcttgtcagtggtgtgactttcttctaacaaaagagcacgcatgggccgggtgtggtggctcacgcctgtaatcccagcactttgggaggccgaggtgggaggatcacctgaggacaggagttcaataccggcttggccaacatggtgaaaccccgtctctactaaaaatacaaacggtagccaggcatggtggcacatgcctgtaaccccagctacttgggaagctgaggcgggagaatcgcttgaacccaggaggtggaggttgcagtgagccgagatcgcgccactgcactccagcctgggctcgacagagcaagactctgtctcaagaaaaaaagagcacatattggagataggggctgggaagacgatttcacagaagaagagtcctcctcctgcagatccaagccttaggagcaatgtgtccagcttggaataagttgatatccacttttaaagacagaacaagaagaggaaaagcattaggggaggagcctcctgttgcccccagggacccggttccttgtgtgatgttcccactgggttgcattccagcgagggcttcagcactggggacacagaagtcattctcctgggaacaggcatccttcacaggcgcttcggggggcccagtgagctgtgactcgtggggaaaatgccccagtctccacgatgccacctccaaagtcagttttgtgtacagcaggactctttactggagccagggtcaggacacgtgtggatgaaccacgaccaaactggggatggaaatgccggtagtagcaaagagacggcggtgatgatgagcagagcgcatgcattgaggcacttactgtgtgcgggcgctgtgcttagtgaggggcacacaggacctgctcacacctccgggctttgcctccatgcccgctggtgccagcccagacaccacaggcatatgatgtggctcatggttccccagagtgccactgcccggcctcagtgggatttaatggggactaatggactgagaaacagccctgtgcaattgcactgagttgtctcagagccacctggcatgctgacgatcattccctgattttgaaattgagggcaatctgcttattgaggaagcgtggcaagtgaaagggtctcagaggcagaaggtgaagggaaagccgacgggcctcatctggtcccctcaaagccccgggggcctggcctcggggtgggcgcagggaggaaggccgagcggaaggaagcaggccttgtctgagccacgtgagagcctgtcctacagggaccgtgccacgtgtctgtcccatgcactcatgggctcatttggagttagggatgtctcagcccaattgacttaggggaagtcaggccatagtttgtggccatggaaagttgtgagtgaacaatccatcttcgtcatccctgtgctggaggctctttaaaggacgggagacagagtctctcatttgtgagccaaggaagagctcccaagttgcacagggacggccacacagctggggtcccaaggctgggacctggcaaggctgggacccggcttggcagcctcagacacacagcaccttcacctgtggcaccgcccttggccgtgggctctacgtggcttggttcagccctctggctgtcccttgcgccccaggtgccatggctgctttggcaggagggtggtgttccagggtggtgctgcctggcagggttcccctctgcccagagccaggcggagatgggtggcctcaagctggggctgcgggtgtagcagggccagcctttccagccccaccagcagcacgaggggaagaggacaaaaactgagttctagtcttcagcctgaaaccagactccctgaacagcggcctctgggccccatatgggttggggaactccaccgccccaaggggtgtgtctggagccaggccatgcctcccgaagctgcccccagctcctcacccacaactgtgtgtccctgagcactttctggaggtgtttgtaggatgcagcctcttatcccttaaacgactgcatttaccgcccacctacagcagcaggagtgagtggtgagacagcctccggcctcacaggtcttgcctctgccgtgcctgatgggcacccgctctgtagaaagcaaggcgagtgctcggatcacacgccgctcctggcgtggtttctggtgtgcactagtcctgcaggtcaggttgaggttgcaggggggaagattatttttatcgaagttgtagtcatttcctggggctgcgtaacgaattctcataaactgggcagcttaaaacaatagaaatgtattcccacatagttctggaggccacaagtccaaaatcaaggtgccagcaggccctgccacctctgaaggccccaggggagggaccttcccggtctctcttggcctctggtggctgccggcggcattctctgcctgcttcttcacctggtgctcccatccgttctgtccaaattccccctttttgtaaggacacccatcctattggagtaggggtcaccctcctccaggatgacatccccttaactacatctgcaacagtcatgtccccaaatgaggtcaccctcagaggcagcagggttaggacttcaacatacaacttttggggggagatgtacttcagcccataacacaccacgtgggaggataacaccgatttcagagcttgcagaggaagccgccaggaactccagtgagacatcagcccccaggtgcctgtcaggcacgccgggctgtggggggcacctgggcccatctgagtaacggaggcgcatccgcacttcccccaggagtacatttttagaacccacagcgccataaaccaaagacaaggagacttcctggtgccccgtcagcttctggaggcgacgttctcggctgacagctctggcagcctcccctgtaggtgagagacaggtaaatgggactcttgcttccaaaacggaacagggtaaaaattctcaagcgttgtcgacacattgagaaaaaacaaatccagcctcctgggctctggtctcatccccagccgcgtcatgtgccccaggccggcgttgccacacatgaaaccccttcctgtttttctatgtagaaaggaactcagaatagagacactgagatattcgtgttgtcccttttgtctttgtcaacagcagagttacatcttactcatgagagccctgtagcaatgtggggaccctgggaccagtctcagttaagctggaacttccccggatgactggggagaggagctgcaaaaggcagggtgggggtggggggccttcccgagatggcagcccagccagaggccagcgttcttgcctctgggaagagaataaaggccccagacagggtggagctagctcagccccgtgccacacaaatggccagtgtgagcctgaaatgtggagctacattcagcccacatagcacaccctggtggggcctcggagccaggggtatggatccaccagaagctgccccttgggaacagcagtggcatcggggtccggcacacagcacccgggagcaggtggccgtcccctgacactcacgggctaggtttctcctgcttttccctcaaagaggacagaggtccaactgccagcttacatttagggcaggggcaggggcaggtctaccccaggggccacggccactctggcccccagcactgtgccaggcagagagcagagcatggaatatggggttcacccagagctggggagtctgcaggagcctggggtggcaactgagggctcagcgttcatcccaaacaaatggccttgcccactggcctaagccccagagaagggggatggggaccccaggaaatgaaagcaaagataagctccaaataggatgaaaagaaagagctccatgccagctgctctgtttgctgaagacgctggttcccgtggcagcggagcgcagagagaggggctgcctggccaggcagggtcagcgggccccagcagaccctcctctgctcccagctctggtatctgcaaggaaacagcgggattcgaacagtcaaactgtcttgctcggtgaagatttccataaccctcctggggaatgcaggagacttacagagacagcacatgtgcgaatgtttacacaaaacaggttaaaagcagcgaagaaatcatcatcatgccatctattttttttaactacgcagaaaacgttcgttacttctcagaaatgtgtaaatggaatttctcgtttaatggatgacaatggaaatcatttgattggtgcattttgttggttggttttgttaatactttgctgaatctgttagcgttcccccttacacatcaaactgtggtagcaactctgatgggttttgcaagcatgaaacagagggaagggctaccaaatggatctccgtggagcggtggttatcacggggaagagacggcagcatgccgagaaaataacaccgaagcctctttttccagaaaggaaatagattgattattctagttttgaaaatagcacaggctcattggaaaacctccaaactacactgatgggagctgaagggtgcacaccgatcatgacaacagccggcaatgtccccccagtttaaacctggacacgaggccttctagatgtttttctgtgcatagataccttgttttgaaaaacaactaaaacatgcgttgtgtagtctttttttttactagtggcattgtgagcaataaatagattaaattttaaccagcgtacagctcatagattttcccagaaggccacaatcaagcactctttttaaacctaccgaatgtgctctttcttcctcgtagcgtggcattttttggcacttgctttcagtacatactgtgcatagcattcttattttcccttttcatgtcaagtttcctcacttggcataatatccgtgatgatcctcctaatggcataatagtccatcatgcggaggcactgtgctggtttaaaccgcttcccgtcttgggacattcaggtggcttctagtcggttttgtgtttttgttacagcagatcacaccacggtgaatatctgtgtgcatagagctgtttgttcctgtttaattcttggcttaagataaattccccaggatagatatgtgggcttaaaggatacgaatttctatatggctcttactgggcagtattaacttgctctcccagaagaaggggctttatttacaaatcgcaggagcttctgctgcatttagctccctgagtgcccccatagcctggtgaatgtcacacaagccaggcgtgacccccacccaccatcgtccaagtacacagggagcctgttcacttccaagcaagttcacacccatagggtgtgaacccagatcggcccagccccctggtgcactctgctgcaggggcccaagagcagccagacctcctggggcagctgctcctcattcagcctctggggaccaccctgaagccagcacactgcccaaccggaaggtggctttcctctgaaacatgcctggctcactttgccctgctcctatgtgggatacctcgataccaagtgctaaacaaaaacagagtcagacagaaaactcatctgctaacattacatgtaacagggaaagttggaaacattctaaaagtccatcactggggactggattgctaacgtgtgctatggccacaccctggagaaacttggaaaatgaagctaagctctgtggagcaacttgggatgagttcatgatatgttagatgacaaagcaggttgcagcagactgactttggtgcaattccatctttgtttaaaagtacaaaggggctgggcgcagtggctcacgcctgtaatcccaacactttgggaggccaaggcaggtggatcgcttgaagtcaggagttcacgaccagcctggccaacatggtgaaaccccgtctctactaaaagtacaaaaattagtcaggtgtggcagcatgcacctgtaatcccagctactcaggaggctgaagcacgagaattgcttaaacccaggaggcagaggttgcggtgagcaaagattgcgccactgcactccagcctgggcaacagagtgagactctgtctcaaaaataaataaataaataaaaattttaaaaagtacaaaggggcggggtgcagtgactcacacctgtcatcccaatactttgggaggctgaggcagaaggatcgtttgaacctaggagttcaagaccagcctgggtaacatagcaagaccctatctctacaaaaaataaaaattaaaatattgttaaaaggtaaaagcggccacccatgtgtgtccacacttcaaaacattctggaaagatacaccaaactattagaagtgatttccagagtatgggatttagggaaataaatgggtaaagtgaggacttcggttttcatattttggtgtttttttttttactttactcttgtgttgtttagattttttagaatgtttttcttttgaaaacagcttctaaaagagaagatagccctcaacatctgacttttttttcttttttttttgagatggagtttcgctcttgttgcccagactggccaggctggcgtgcagtggcacaatctctgctcactgcaacctccgcctcctgggttcaagcgattctcctgccttagcctcccgagtagctgggactacaggcacacgccaccacgcccagctaatttttgtattattattatttttttaatagagatgaggtttcaccatgttggccaggatggtctcgatctcctgacctcatgatcatcccgcctcgacttcccaaagtgctgggattgcaggcatgagccaccacgcccagccccaacatctgactttctgtgtgttttccaagagtctagtgtgaggtcagaggtcagacaggtcatcagggattttgcttcgagtgagttgctgctgccctgactcctctcccacagcaaataagaccacacggggcttgggggttgggtttgtcgcttgcttttgctgtgctgagggcttcaccagactgaaacagcaggaccacagctcatctctgctccttctctctaggaccaactgcccctgtaagtacagttttttggataaccacaagaagttgactcctcgacgcgatgttcccacttaccccaaggtaagatgagattccggcccagaagaagctgcagctgtgtccccagccccacgcccagccctgtggccctgcggccagaccctgctgtgtgtacgttcacatcaaccgcccctcccagccctgggccgctgacggtgcgggttactttaaggcaaagtattttttctctttgacatttgtttagcaaaagtgatcccagaccataccttcccctgcaaggacataacagctccgtgctgctgtctgcccggccccgggagctgacctgggtagacagtttttacactcaaacgttactggaaagaactttaacgtttaactgaatttttaaaaatccattccattggcccttgtctctgagcaattcttagttgtcctggcaagttttgctcttttgcacaaaagtgttcttagttctaagagaagctgtgacgttggtgaagtagcaatggcatttttgaaataacgacaaaaggagggtctcgagttgccggtcacccgctcaacgccttcagctgggaagcaggcaaaatcccggcccacctgctttttttttttttttttttgagacagtgtttcactcttgttgcccaggctggagtgcaatggcacaatcttggctcactgcaacctctgcctcctgggttcaagcaattctcctacctcagcctcccaagtagggggcattacaggtgcccgtcaccatgcccagttaatttttttgtatttttttagtagagacagggtttcaccatgttggccaggctggtcttgaacttgtgacctcaggtgatccgcctgcctcggcctcccaaagtgctgagccaccgcacccggcccggcccacctgatttgtaatgtgctctcatgctaagattcagggggcacagcttccagagacagcagaggcctgggctaaacacaggtgggctctgccactgcctgcggttcaagtgatggcagagccttccacagcctccatgtaggccactggtgtccattagtccgtgattctatccacgcagttccaaacaatgtcctggatattgtcaggttctgggtggatttggggggtttttgtttttttcttttgatactgagtctcactctgtcacccaggctggagtgcaatggcatgatctcagctcactgcaacctctgcctcttgggttcaagtgattctcctgcctcagcctgagtaggtgggattacaggcacccaccgccatgcccggctaattactgtatttttagtagagacggtgtttcaccgtgttggccaggttggtcttgaactcctgacctcaggtgatccacccacctcagcatcccaaagtgctgggattacaggcgtaagccagcccagcctcatctgagatttttgaatggagactagtgcctttttccattggaaaatatgccccgcgcttctcaggatcctgtcccagggagccgtgaagcacagcctagatccaaaataaaaggtgtcagccctccagatctgtccccttacaaaaaacagaaaaacaaatatccagtaagacctaggagaagacagtgtgcaataccaaagcagtgttcttgtcttctgtatagaaccacagccttctgtccttgtgacagcttaacctaaagcctgatgtcctcagaagcaacccaggggcaccggccccatcagcaggcctgctcttctagctctcggcagaaaccaggaatgggttccagacaggagcatctcagaataacttcttaggtggtatctgaatttatgccaagtgaattttacccccacacttcactttattgccctttttttattattatttttgagatggagtctcactctgtcgcccaggctggtgtgcagtggcacgatcttggctcactgcaacctccccctcctgggttcaagcaattctcccacctcaggctcccaagtagctgggattacaggcacctgccatcatgcctggctaatttttgtatttttgtagagtcgggattccaccatgtttgccaggttggtcttgaactcctgacctcaggtgatccgctcgcctcggcttcccaaagcactgggattacaagcatgagccaccatgcccagctattgtccattttatcatcgggcttgttgaggtctaatttacatgcagtaaagttatttaggcttggagtacagtgaattttgacaaacttgtttagtcctgtgacctccaccacaagcgagatatggaacatttctgtcaccccaaaccctcccctctgctccctcaccctgcctctggcatccaccgatgggatctccacccgtagcattggccctttccagaagtatgtggcctgtgagtctgacgcaggtgccttagaaagagaacgggagaagctgggtgcggtggctcacacctgtaatcccaacacttggggaggccaaggcgggtggatcacctgaggtcaggagttcgagaccagcctggccaacatcgtgaactccccatctctactaaaattacaaaaattagccaggcatggtggcgggcgcctgcagtcccagctactcaggaggctgaggcacgagaatcacttgaacccaggaggcagaggttgccgtgagccaagatcgcaccactgcactccagcgtgggcaagagtgagactctatctcaaaaaaaaaaaaaaaaagaaagaaagaaaaagaaagagaacgggagaaagaggagaaatatctcagcatgcacatcactgtcacaggcccacggcgcctggttaacacggaactcctgtcctttctagtacctgctctctccagagaccatcgaggccctgcggaagccgacctttgacgtctggctttgggagcccaatgaggtaagtgcggggcttgcaggcaccacgtcccagggggaggcagctcaggatcttggacgccagtgggaccacccccatcgctcttcctccttcttgctttttcctcttctttttaaagactgaaaaaaaaaaacaaaacttgttttgccaggttttagttgaaactaactaacactttatagcagggcccaggagacttcacagcaaggggattctgtgagtgggggagacggctgtcaggggcagggaggctccacccagggctcctgatggcgctgggccccccgagccatctgctcatcctgcagaccctcatgcacgccggtggcagccccgtgctgcagaacacccctgccaggagcaaatctctcctcaaggaaggggctgcggtcagagtgctctgctctgagagcagtgtctgcaaaggcaaggcacaggcaaccggctgccccagataagtggacatgtgggattccgggaactgtgtcaccttctgcagcaaggcttgaggccaggaattccacactagcctgagtgatatgatttggctgtgtccccacccaaatctcaccctgaattgtcataatccccacgtgtcaagggcagggccaggtggagatcttgaatcatgggggcagttttccccatactgttctcgtgatagtgagtaagtctcacgagatctgatggttttataaatgggggattgtcttttgcctgccgccatttaagtgactttctccttctctgccattctccatgattgtgaggcctccgcagccatgtggaactgtgagtcccttaagactctttttctttataagttacccagtctcaggtatgtctttattaacagtgtgagaacagactaataagctgggcaacatagcaagacctcgtcgctacaaaaaaaaggtgttaaaattcctatttgctgaaaaatacaagaatggggaattttttgtttcatctcattggctaatagaccccctcttttcacaccccaaaaaatgaaaaagttccctcattgcagacctcggcctcagctgttttcaacgcaccaaaatctaaggacgttttcctgcttgtcagcaacacagaaaatgcacaaggctcctcagcaagctcacctgtgctctttgacaagctcggccgcagcgatgtctctgcaaagggcagaaagtgggctcttgcctcttggcacccctgaggccaggctgctgacacctggggcactgccctctcctaagtgaacctcttttcatgtgcatggtctcccagcaggagaaaaactgcagcaccagccagaaaagcaaagctccagcctccactccccagctcagttcacccaagagcagcaggcggccagtcccaggggctgcactgctgcaaacctgctcaaaacctccagccgccacgtggcaacttgctccccagctctgagagtgcaggaccggggcgcagagacgacagaagaggctttaaatatgcagaatgactgtctaggtcaacgcacaaaaggaaagggccccaggtgtgggagatgcaaggggtgagagggaaagctcagaagagacgtgttggagctgctggcctgcagcagctcccagggtccctgcacagctgctgagattgggcagagcaagtacacagcaagtagacaccgcagacagttagagcacactgactcctgctcccagcctgtgggcaaccgccgcacctcagcatcatgtagaaaaatcaccatccccaaagtcattttgacctcagcctgctgggaggaagagccaagccaggggccactgatggcaaagcacctgcgtggaaactggcactcgctgtcttttctgccaccttctaccagggaaccctttgagcacgggccactgtgactggggaggtggggcttgccccacgaagctgggggatctgtgtctccataatagaaaggccacctctctgtcctctgatcacagagtggattcacagctgctctcggggctggcaggtgggcaaggcagacagctcccggcagctggactcagcctctgggtggcatctcccacggcccgtggctcctgcccagcagatctcaagggcactccaggagaccgatgagggttccagtgcttccaagaagtatctagctgcctgtgtgtgagaatgcagagatgcccaagacaggagccttggcctctggcagatctagggatgccaggaattttggagtgtgagtggcaaagagggacaactaaagggacacacatgaaaacagcccactcggccccacaaaactgcatctggccacgcatgaggcacctggcactcagagaacgtcagggcgcctaaaagtgatcacctccctcccttccagcaggggcgcccccacttttctccgagtggtttggcccagtgtcctgcccatcacaaaccagacagaggacatgacttcaggctgctgtgtcctcccatgtgttagggcctccgagggcccagggctgtggcccgtgagcgtggcctgcctctatcctccgagggcccagggctgtggcccgtgagcgtggcctgcctctatcctccgagggcccagggctgtggcccgtgagcatggcccgcctctatcaagtgcagagctggaaggctgcaggagcctcccccgtcatctcatgagtcccccactcacgaccatgcagcccactcagaccacgacctgccgccacatgcgggaactgctggctccctcgtgcccgcccggggctgaggactgcacgtgcagccacagatgcatccggccctcctgccccacagcctctatgaaggccacataaatggcaccaagtgtctctgtctgccgatcagcatcccctcttggcttcacagcagacgcatctgcctttcaggactgccttgaacaacatctgggctggtcaggtggagagcgaggagtttccaggttgcagcccctatggtcctgagggctggcgtccaggatggtgggggtccagcagctctgggcagcgaggcccctggctgggtgatccaggtggcagctgaccagtggcctgggagccagccctcctgtcctcacgtggggccccatctccaaaagccagtgcagtgccctgcacattatccaacctacatctgtactgtctccccaaggaaaacgagtgtgtggttcacgtgctttaaggacgtttcccaggtgacattccaagctcccatctgtggccgcaagtgggggagtttccagttttccagatagattttctgccatgccagagaaccctccgcctccttcagagccatctcatcaatgcagtgatcgcaagcttcgatttacaaaaactcgcctcccttgcagcatttccaggtttcacacacagcgtaacaagtaaaaatggatttttgggcagcacgcctgtcctagtttgctgaggctgccataacaaagtaccagagactggggtggcgtcagcagcaaaagttgattcctcagttctggagctggaagtccaggatcaaggtgctgccaggttcggcttctccggaggcctcggtccctggtctgggaccttcttgctggggcctcggtccctggtgtgggaccttcttgctgggacctcggtccctggtgtgggaccttcttcctggccagcaagatggccgccttcttgctgggtcctcatgtggcctgttctctcggcacatgcatcccaggtgctcttcctcctctaatgaagacactagtcccatgggaccaaggcctcaccctgactagatggaaacttcattacctccgtaaaggccccgtctccaaatagccccactggggtcggggctttaccatgttgacctggggaagggggcagttcagttcgtaacatgcccttttgggaggagaaagtcaggcaatgagcagacacaggcaggaagccacgccgggctccagcagggatggcccagtgccctgtacaggcagcaggcagctgggctggaggtgggccctgggtggaggacacctaccaggtgtgtctaaactgcccctttcctacacatcttccttcgcactgggctcgccacccaagacctgctttttccagaaagcaaagcctactttggtcaaactctcatttttaaaaatcacttcatcttttcctccctaacttaattagctccaaagcactgagctgtattgaaatagatcaccacaatgacaatcctctttgggactgaaaacaaaatctatttcaacttgaacagggatattgatagaagacagggctccatgaaaaagggttaggaggagccgcttgctggggcaggggccgcatctgggcactgcagttaagatgttaaagtgtcttcggtcccagggggccgcagatgaacacagttcagcgtttctggatgtaaatcgtcaaagctccttcgatccccagcctcgggcaaggaaagggcctttctctctgtgatgccacctgtgctcaggtgtgcactggatggaactgtgtcctagacccctcagctgtgatattgatccgctgagattgtttttcatctgtagaaatcaataaattcctttttggtgcagtgttttgtgaacgggtgcactctctcacccggtcgctgtcctaagaattctccttgacttcggaactggccctccacgccccaggatccacctgccaggagacccccagtgtgctctcaaacccccacccatctgagtggcctggaaaggctggtctgaagacctctcttcccatgtctgccgaccaggctttgctctccagggactttctgggagggggagaacccacctcctgccaacggccctgctggcactccgaggacagcagagggaaggaagccaggggctggggagccggccacacaactgcccagtgcctatccttctcctgtgcccacagatgctgagctgcctggagcacatgtaccacgacctcgggctggtcagggacttcagcatcaaccctgtcaccctcaggaggtggctggtgagtgccaaacccgccttcggttcttcctgggcacgtggtttcatccagttccacaggaatggagggaatggatcaccagggcaccttccggatggcactgcgctccctgtgagcagaggtgacatttccccgggagttctgtgaggacactcagcctgtctctgttcctccttccaccaaaaccttctttacgcccgagctactcctgctctgataagcaaggagtagcttatcagtgagactctgccatcatcaagcaaagcagcatgtcctaaagcagcggtgtgtgggagcgtgtgtgtgtgtgtgggagcgtgtgtgtgtgtgagagtgagtatgggggtgtggatgtgagtgtgtgtgagtgtggggtgtggatgtgagcatgggggtgtctgcatgtgtttgtgagtgggtgtgtggatgtaaatgtgtgggagcgtgtgtgtgtgtgagtgtggggtgtgggtgtgagcatgggggtatctgagtttacgggtgggtgtgtgtgaatgtgtggtgggagtgtgtggggtgggagtaggagtgtggaggtgtgtctgtgtgtgtcagtgtggatgtgtgcatgtgtatatctggatgtggggtgtgtctgtgtgtgggtgtgtgtgagggtgtgtgtgcatgtgtgtatctgtggatgtgaggtgtgtgtgcatgtgtgtatctggatgtgggggtgtgtgagggtggatgtgtgcatgtgtgtgtgtggatgtggggtgtgtgagtgtgtggtgtgtgagtgggtgtgtgcatgtgggtgtctgcctgtgtgaatatgtttggcagcaggtttttttaatgaaatattgctcagaaccaaatattaaaagcctattaaaggtttcatggtgactggggacccagagctccctcttggagtctcccctccccccatcccctaactttatgccccactgtggctcctcagacacctccggggagaccccagtccttgactgcagggtgaaacccctggtgggagctctgtccccacacctgccccgggtgccgtggtgtggcccgctggacgttctcagggtccctgtgtcacctcattggtacctgtggtaaacctggaacactgttgacctctggttgggatgagggtttggcagagaatgttcaaaccagcgcacagccttctgggtggctttgggaggagaggtgggcgggcccaggcacagggtgactcggaccccctgcctcccgcagttctgcgtccacgacaactacagaaacaaccccttccacaacttccggcactgcttctgcgtggcccagatgatgtacagcatggtctggctctgcagtctccaggtgggtcctgcccgctgcacacccagacctctactctcgggggtcagacggaggcccccttccagggagcggcagccccatcccaccaagagagccacaggcgtggggtccccagccgctccgcccctcctagggacgcacccctgcccaccgttgtcagtcaccccatgggcgaggctgctcctaggattacgagagcaggtgagtccccgacctggtcacccccccaacccccacaggcaggccgatcctctcccaccatgccaggagatgccagatggctgcaggggcctttgtcccccgcttaccactcacccaattccaccccccctcaccccatcccaccctccgagtgaagagagcaaacacctacgccctgttttccaatccaggagaagttctcacaaacggatatcctgatcctaatgacagcggccatctgccacgatctggaccatcccggctacaacaacacgtatgtacaggattttctctttttttccttttaaaaggcaccctggctactggagggaacctgtcagcccaaccctcagagcagttcccagatggagctgtcaacgacggcctcccagcccccaactctgcctccactgacacagctcctggcttctggactttgcccagggccttgggtctccccggagtaggaactttcaggattatcaaaccccaggggctctttcccactcctgtgcgggcctggcttcaggctcaggtgcacggcagatccctggccccgccggcgccttctccaccccaggcagggagcaacacctgtccgcatgcagggatgggggctccacacccccctctcaggagctcgcctctccctgggcaggctcccagctggcttccgcagggaaagcacaggcaggagccagaagagagcagaagagggggagaagagggactgcagagggacaggaggtgggagtgaggtgtccctcgtggggccagggatcagaaggacagaccgttgctccactcctgcctccacaggcacagagttccgccccatgtggcggacaaggtccaggccatgggcttgggtctgtgtcctcagtggcgcagcagctctctctgttgaactgtgtgtttgtgtgatgtcatcacatgcctgagagctctgctgccatgtgtcagcgcctagtgggttccgaggtgtggctgtcagcgctcctcccggggccatcaccatgcacacccatctgttccccttttgctcatttcacactcacagtggccggcacagcacaggtcagcagaggccttgaccacagcatcccagtgaacctcagcctcgttctgcccacctgcctctggcacctggtgacgtttgataatttcacaagaggccgtgatgcctcagggcctgtcccagggagcatgccgcttcctcagaggtgtctgtctggtgggactgcaggagcatggggacgtgcagttgcaggggcagctgagcggcaggagggacctcctggccaggccagggcacaggcagctcccccagcccccacggcaccttctcctgactctacttgctccacttacatggctgggtgttgctcccccgtgcaggtacctggtgagggcgcctgagtctcccctcactctctccttgcctcccaggtaccagatcaatgcccgcacagagctggcggtccgctacaatgacatctcaccgctggagaaccaccactgcgccgtggccttccagatcctcgccgagcctgagtgcaacatcttctccaacatcccacctgatgggttcaagcagatccgacaggtgtgtggggtgagggccctcccaccggagtgggggcacattcagggacagagcagcccccactctccattggctggaagctcccagaagctcctggccacagcagtgccctggggacccaagggaacccctccctccttcctcacctcctccagggcccagagtggagccccaaaaagagggtaccctcgccatgcgcacgtgcatcccactgacctgcacttcccagcctgtatttaattcagccttcactggctccctttgagataaatcctttgtccctcttccagcccaagaaactgaggcttagcaaaggtagggagcctgcccaaggaggggacaggccctggacagacacatctgctgcatccaacataggagagctgccccctgccccataaccccagctgctgtcacctgccacccacagcccagtcagcccccttccttttatttatttttttttcttttgagacagagtctcgctctgttgcccaggctggagtgtaatggcaggatctcggctcactgcaacctccacctcctgggttcaagcaattctcctgcctcagcctcccaaatagctgggattacaggcatgcgccaccaagccggctaattttcggtatttttaatagagacggggtttcatcatgttggccaggctggtcttgaactccagacctcaggtgatccacctgcctcgacctcccaaagtgctgggattacaggtgtgagccaccacgcccggccaccccttccattttagataagggggctttatgcctctcagggcgtgatgggaggagagtgagaggatatctgcgtgagaggaagatgacctggtccacctgccccagacaaacacctccagctcaccgaaataacgccccattccacacgggaattcctcatcaaaccctcactctctgacatttgcaggggagggaagctctcggagtaaaccctgggagaaatgtgttgggttgaatagcagcgtccttcaaacaaggtccacctcccgtgaatgtgatcttatttggaaaagggtctttgcatttgtacttgttaagatttccagataagatcagtgtggattgtctaagggggccgtaaatccaaagactagtgtccttggacgaggagacagagtagaaaacagcccagacacagaggagaaggccgcatgaagacgcagtgattggagatttgagtgatgcagccccaaactaagggacttcggggcccccaggagcaggaggagacaaggaaggaccctcccctggagtcttctttgagagcagggccctgcccacactttgatcttggttctggcttccagaactgtgagagaatgagtttgttgttttaagccgcctagtttgtggtactttgtgtggcggccccaggacactcacccagggcaccgtcttctgcggttccacaaggcagacctcagccattcgaagtctaagtggcttccttccagaggcagcaagaaagactgcctggacttcagcactgggaagatactcaccaccctccaggcgtgctgctgagcctccctttatcagagagcagcagcctcttctaccatggctttccaatttgtctacgcttccaggaagttcaaagcccagtgtaaaaaactgaagtcagtgaagcatttggggaagctccgaggaagcagcatgctccctgggacggggccctgaggcatcacggcctcttgcgaaattgtcaaatgccaccatgtgccagaggcagaggtgggcagaaccaggctgtggttcattgggatgctgtggtcaaggcctctgctggcctgtgctgtgccagccactgtgagtgtgaaatgagcaggagaacagatgggtgtgcatggtgatggccccgggaggagcgccgacagccgcacctcagaacccactcggcgctgacatacggcggcagcgctctcgggcctgtgatgacatcattgcacaaacatacacaattcaatagacaatttacagtcattattgaatcactggttcccagtacagttatctcccctttatctataggctctctggcctctcctccatgtttgtgcccctccccaccctgcaagcaggtgccctgtgtggctacgataagctgtggcaaatcttcgtctgcagtaggtcaaggagcaaccgtgaagagagaacgctgcatctgccactgctaccccagtggggagctcctccagggacaggacctggggaatcaaagcaagtgaacgccccttagtgtaggcctcgtcccactgagccatgtcggagagcatcccgcaagagaaggaggcggcacctgattggaggagcagccgctctgcacaggggatcgttctcgtgcccatccaccgtggggacacaccagcattggcctgcttcaaatgcttcactgactgcaaaatatgactctcctctgggggtaaaattagttgtcccacttttttaaaaatatattttgtcatggaagatttcaggaataactgaataaatgcttcactaataacacaattaaatgtttacaggaaaattgaataattcaagatacaagtgatccccccaaaaaaatatatatatatacagttgaaatgacctagattgatgggtttgggttttgtatctgatgcttgttgttttattttcttggaagaggaaaacatcatacctggcacagagatgtgttctgtaaatgcttgtggggtgggtgggtggatggatggatggatggatggatggatggatggatgggtggatgggtggatggacaaatggatggaagggtggatggatggatgggtggatgggtggatgaatggacagatggataaatgggtggaaggatggatggataaatggatggaagggcagatggatgggtggatgggtagatggatggaggatgaatgggtggatggatggatgaatggatgggtttttgggtgggcagatggatgtgtggacaaatggatgggtgatggatgcacatatgaatcggaataagagatacatgaaataatgtgtgcagggggctcagtacacagtaggcctccgctgaataattgttcagactatacccgtgttaacacgttgttctctcgctatttagggaatgatcacattaatcttggccactgacatggcaagacatgcagaaattatggattctttcaaagagaaaatggagaattttgactacagcaacgaggagcacatgaccctggtgagtggcttattctgcctgggtgggcagccaggcggtgggctggcgaagcaggtcatccatccagctcacactggaagccaagaagctgaaattattagtcttcttggaacaaggtgtctataaatctggttttcaaggtcatgactcttactaggaaagtccgggcagggcctccctcctgatgggtcctccttcatggtcagaggcagcattctcccattcctccatctcttttggatttgaaggagataagtgggtgaaggccgtgcatctcgctctgctttccagagaataaaaccagctctcccatgaaggcacagccccagcatggcactctgaaagcccacctatgtgggggcaactccaacacagctcccgctccccaagccagcatcccccaccaggcccacaccatagcccagcacccctccataaccaggacaaggtggccagagaaggggtagggggcctcccccatgagaaggtgcacttaggttgcccagcatctgccttttggaaaggacaggcactgggcacaccaaggcacacaaggaccagagcacgactcatgcctggaatccagcactttgggaggccacggcaggaggattgcttgagtccaaaagtttgagaccagtctgagcaatattagcaagactccatctccacaaaaaaagaaagaaaaataaaaaaatcagtgcatatctgtggtcccaactgcttgggaggcagaggtgggaggatcgctggagcccaggtccaggctgcagtgagccatggtcgttccactgcactccagcctgggcaacagagcaagggtctgtctcagataacagagagagagagaggtgcatgagaactgccctcccggccttcagagagaaagctggttttgtggagccttgtctaagcatcaggtgcacccctggcattcttactctgaaatttgattatctgtttaaaatcaatagcatcactttccacctccagagaggttgaaagatagggaactctcggctcaggctgaccttctaaccatccagtcccagtaggtagagtcattaggactcatcgctctctggagctgaggtgcagttaattcccaaagactgtgcgagaggatgggagctcccgcaggcaagggctggacagcaggcaaacctccccaggccagggccaccagaagccccttccctaagagggaaacagtcacatagagcggcttcctggcaagcaagtttcttgctcctgaaaaaccaagggaaggagggaggcgccgccttgtcctctaagatatgaggaaggcagagatggacctgcagtcaggggtgacccaggccccgccgatgccttcctcctctgaggtgggaggagaggtcagggaagagacggggaggggcaggatgccagaggatcgggtgccaggtggtcaggacaagtgaacccagctgaaggtccccactcccaccccacccccagccttacacactgcagctgtgcagaccagaggcaaagcgaggctcagagcccagggttccgtttatcccaacgacctgcaccgcggggtcagatgacaagcagcacggccaggcatcgtctcactgctacggagccccagacggggctttatgaacacgggtggaggacagaggttggggtaaggtctcgggggaaaggttctgattcaaaatgggccccaatagggaggcctctgaggatagtgcgggccagcgtgggaggtgtgaggtgcagggagtgtggccggcagggcctgggaccttgaccttccccagagacactgctgccctggccctgccctaggtctggtgtcgggacagctccactgaggccggccaggcacaggctagtcattgcctctgatctggagccggactccacagaggagtcaaagaaaggcctgaatggcttcctgggaactgatagggcagggaaaggaagggcgaccacagcaggatcccttcgaggtcctgccgaggttggaaggcaggatccaccaagcatcatgcagactccgagctgaactgagctgctcctcacctagtcacgttccccaaaccagcaggtgcagcccgcagcccgggggcatgtgcctcagctgggctttcctgtctaatcagcttcagagcctggatggcaaccaacactttggtctggaaacctggtgattccagacactcatttgtgcccggtgcaggcagggccacgggacgccagccctccacctcttgtcctatggcgacatccgggctagtttgggtggaagctgctgcattcctgggcctgccctatctcctcctgaagctcctatggcatgcccaaccctggccaagctgagacagagctacctgtcccctgggaagatgagcaatgcacccacctagggaacagcagaaaatagggggtgaccaggcacagggcagtgcttcaggggatatcacctgggctggggtggccagaaaggctggaaggaggggacccaaacaggaccttgaaggttcattctccattgagaagggagcctgtcctccctgaaggcagccaagctcagttgcatggtccagcaggtcctccgtctcttcctgcctgtaatggcaagtccagacccgagcagcagcagcaggcccgtgttctacctcctgttacctcaattccaaaatctcttctttcagctgaagatgattttgataaaatgctgtgatatctctaacgaggtccgtccaatggaagtcgcagagccttgggtggactgtttattagaggaatattttatgcaggtaagagtcttgcagagcaatcaagcctccagccactcttattagccccacttagtaagggtttgcgttaaacgagcacgcctgggtggtcccgcatattccccgggctgccgacagttcagcctccagaaagccttcagggtaagcgtacatcagaaacaaaataggttataatttgagacctgaaagacagtaacaatccagaaaagctaatactctaaaactgtcacctgtcactgctaattgagccattattacaagcagccttgtcaaacaaattgcctgaaagtcaagaagcaaggactgcagaagcaggagggggcccaggagggccgagacccagcaggtcagctcacacagatggccacggggaaggtcggggacatagaaaaccaagccagctgaaaacaaccaccaaatattaatacaacagcttgatgaaccctaggagaagtcgggaggctttctgcaggacgctgctgccgtcctgggatacatccatccaactcacctctgcctatctctcaggtcggtcttcccagctagacctgcacgcccagctctgtttagcactgaagatagggtcaccttctccttgttcttactgagacacatttgtggtgtggtttggttggttggtggttaactggcgcatcttgtctttctctgagaacagcgatctggttatggggcatttctgtctctaatgtcactgtctgctgcattccctgcagagcgaccgtgagaagtcagaaggccttcctgtggcaccgttcatggaccgagacaaagtgaccaaggccacagcccagattgggttcatcaagtttgtcctgatcccaatgtttgaaacagtgaccaaggtgagtaactgtcaccacatgtcacacttgcttacactcagatacatgcatgcacacacaggcacacacacatatacacatatgcacacaggtacacacagacacacactcatgcacacacgtacacagatacacacagacgcacatacaggcacatacacatatacacacacgcacacagctacacacaggcacacacacaggcacacacttgtgcacacaggtacacaggcacacaaatgcacacacacggcacacacaggcacacactcgtgcacacacatgtacacaggcacacacaggcacacaaatgtgcatgcaggtacacatgcacacaaggcacgcaggtacacatgcacacaaggcacacaggcacacacaggcacacaaatgcacacacaggcacacacacacacacacatgcacacaggtacacacaggcacacaaatgcacatgcaggtacacatgcacacacaggcacacacagggacacacaggcacacataggcacacaaatgcacacacaggcacacacatacacacatgcacacaggtacacgcaggcacacacgtacagaggcacacacatgcacacacaggtatgcacatgcacgcacacaggtacacacaggcacacctgcacacctgcacatcctgagcagcctcttccccggctgtcgtggtgaccgctgtccctgttccatccagagcctgctccccacagcctggcccgtgaccccagcatctcccactctgtgctgcactccctgccttgccttgctgggccctggggggcccctcactgccctcacccatcgctgccggccttcaggaccctggaggcagcactggctgtggactctcctgtccccactctgcgtcccagttcctcacctgtggaggaacccctgagctctgtgccctcgagctgtgaagcccctgtccagctcccagtctcaccgcacccagccaccgagaccttgctccttgcacacagctcgttcctgcccagctccccccagggcctctgagctgcctgtggccccctgccaaggcccccacctcaaggcacccccagcatgtccaaaacaggcccatctcttgttccccccggggatctgggctcacagcctcacaccctccgaccttcctgggctcctacgctgcgcatccttctgctctagggcatctcttggagccaacccacccacttcccactcccaggaccctcagccgggaggctgtcagctcctttcccctgccccgtgtctttgtaagaacctcccaacctgtcccccaccctcatctcacgggcacgggggacacaggaggcaggaaggggactttctgtaggacctcatggagggtgatgagggccagagacagagccgcagtgggtggaggcagcagagccggcacgagggtgtccaggagctgggactggcccagaggtttccgcacggagcacctgacacctgtttttctccgacgtttcccattgccttaagaacgagggactctgaataaatccgtgtgtctctcccagctcttccccatggttgaggagatcatgctgcagccactttgggaatcccgagatcgctacgaggagctgaagcggatagatgacgccatgaaagaggtaaaacacactgagaagagcctgccttccttgcggcaagcaggcacgctgccctccgcactcccgactccagaagcttggacgtgccaagcagggcaccactgaaggccccgtggacaggcacacgtgtaccttccatcagaaagcctggctcagtaaaattagggaatgcgatgagggaaaccaaaactgcattcgccaagaacacgtcaggtctcagtaccttcgagggagtttactggccgtgcccttcacaagaatcacaactgtcacccacacctgtggacacccaggtgtctttgggtgtatcagccgccgttagagcatctgggacccctcagagtacagtgcctggcctggccccagggctgacttgttcagaggaggccatggggtagaaaggggccctcccctggcacggggacaaagcgaccacccacctgccagctcccgggcccagaacacacaccggcacctctcaggggccagggagcctggggctggctttaggttgctgctggatagatatcattttggaggaaggggtccaggtcacagcctcagggcccacgcagtctttctacggattccccacggctgtctgctgtcctgctgcccatggtgtggcctctgcccctcccagcctcctgcctcctccctccagcgcccccaggcagctagaacagtcttactactcctgcagggtttgacccctcctggccttggccggtgttgcctctgccacccccgctccccacagtgccactgaagcaccctccaaggcccgtcagtcagggctcccctagttactgtgcccaccaccccgtcttttctgcctgggcgctcctgaagcccatgtggcccacaatgcccttttgagcactgagccattttccaggcgtagccttgggttggtctcatctccctcgactgacggccccgtgctccccatgcccacacccgcctggagcgccatgccaggcacatggtaggcgctcagcaattgcttaggagtccactgaaaatccagaccagctgccctgacttctccagttgatgtctcctactggaaagtcacagaaaggtctctaaacctctggaaggctgagagcacttatgcagagggacagatgtagcaagaaggcttcccccactccacaaccccgcaagagagctgaaggggcttctgcctctctcgtgggccctccgagagccatagccctgatggccttgagtctctagtcctgagccctgctgcccagtaggggatagtagggttccttaaggcctctgccttcccccctgtcagcccccacaaaaaggagagacacgccaaagaggtgaaaaggccaagcccaagccgcaggctctgcacacaccaccagtccccgcggctgtggtggctgcagctgggtgagctcactgtccaggccccagatgaggcaccaagggtagcgggacagggtatgcagagctgcctctgaaaagcccatgtcaggagtgcttgggctcagaggggctggggaccacaggctttcacgttgcagcacctccaggcaacagaagctgctgggagagaggcagacactcccctgctgtctcctgctccctgacttggccttctctgtactctgttccagttacagaagaagactgacagcttgacgtctggggccaccgagaagtccagagagagaagcagagatgtgaaaaacagtgaaggtaatgcttgctctgctgaagtggcatctcagcgcatacaatgattctgacaaaggacagaaggaaagaggaaggggagaaaatctgaattttggaatacctttaaatgaatggaactttttttttttttgaaactaagtctcgctcttgttgcccaggttggagtgcgatggcacgatctcagctcactacaacctctgtctcctgagttcaagtgattctcctgcctcagccccctaagtagctgggattacaggcatgagccaccatgcctggctagtttttctatttttagtagagatggggtttcaccatgttggccaggctggtcttgaactcctgacctcaggtgatccacccacctcggcctcccaaagtgctgggattacaggtgtgagattgcgcctgaccaaatgaatggaaattttatttcttgcaactaatcattagaattaggctcttaaggctggtggctcatgcctgcaatcccagcactttgggaggccaaggtgggcggatcacttgaggtcaggagttcaagacccagcttggccaacatggtgaaaccctgtctctactaaaaatacaaaaattagccaggtgttgtggcgtgcacctgtagtcccagctacttgggaggctgaggcaggagagtcacttgaacctgggaggtggaggttgcagtgagcccacattgcgccactgccctccagcctggagaacagtgagactccatctcaaaaaaaaaaaaaaaaaaaagtgaggctcttaaagaaggggaacatgctttagttaatagaaaaacatcaataattagcatatgtatcacttataagagtaagtactttttaaaagtgcaattgaagtactgaaaacttttcacaaatcacgtgtttgctttatatggctttgagcattttcctctgtacttgttgatactagtcattcagctcacggggaatgcagagcagccgtttgttcacctcataataaggtcacactaatggccaggcacggtggctcacgcctgtaatccaagcactttgggaggccaaggcggcggatcacgaggagatcgagaccatcctggctaacacggtgaaaccccgtctctactttaaacacaaaaaattagccgggcgtggtggcgggtgcctgtagtcccagctacttgagaggctgaggcaggagaatggagtgaacccaggaggcggagattgccgtgagccaagatcgcgccactgcactccagcctgggcaacagagcgagacttcgtctcaaaaaataaaaataaataaataagccgggcgcagtggctcatgcctgtagtcccagcactttgggaggccaaggtggacggatcacaaggtcaggagatcgagaccatcctggctaacacggtgaaacccttctctactaaaaatacaaaaaaaattagccgggcgtggtggtgggtgcctgtattcccagctactcgggaggctgaggcggagcttgcagtgagccaagatcgtgccactgcactccagcctgggtgacagagcgagactctgtctcaaaaaaaatataaataaataagtaaataataaataaggtcagactccatctcaaaaaaatataaataaataaataaacaataaataaggtcacactctccatgtctaacagataattcaagagatagtgcatcaagcatgcaaggctcagggcaggacaaacgggacatggctcataagaggagctgcaacaggctttggcatccaacacacctggttttgagtccaggcttgccaattacaagccgagagatgtgcacaagtgtcccagcctctctgaacctcagagccccagtctctaagccagaggcaataataccattgttactgctgttttagtgattaaacagtcaaagtgcttgtctggtcccgatgaagtgctcagtcaatgttgccatttaatttttaagtcagttcatatttttcagtgggtcagaaaagagatcaatattgttttactttgtctaaatgtgttcagcaatatatctgatggcctctttcttttaaaatggtctgtgtgtcggccgggcacggtggttcacacctgtaatcccagaactttgggaggctgaggtgggcagatcacttgaggtcaggagttctaaaccagcctggccaacatggtgaaaccccatctctactaaaaacacaaaaattagccagctgtagtggcgtgcacctgtaatcccagctacttgggagccagaggcaggagaattgcttgaacccaggaggcggaggttgcagtgagccgagatcacgccactgcaccccaacctgggcaacagagcaagactccatctcaaaaaaaaaaaaaaaagtctgtgtataatcctgtaacgtttctgcgactgctggcacttttttttttccttcttttgtgagacggagtctcgctctgttgcccaggctggagtgcagtggtgcaatctcggctcactgcaatctccacctcccgggttcaagcaattctcctgtctcagcctcccgagtagctgggattacaggtgtgtgccaccacgcctggctaatttttctatttttagtagagacagggtttcaccatgttggtcagcctggtctcgaactcctgacctcgtgatccacccaccttggtctctcaaagtgctgggattaaaggtgtgagccaccgcgccctaattctaacaaaaacaaatcagtcatcgtttcccttcttccaggagactgtgcctgaggaaagcggggggcgtggctgcagttctggacgggctggccgagctgcgcgggatccttgtgcagggaagagctgccctgggcacctggcaccacaagaccatgttttctaagaaccattttgttcactgatacaaaaaaaaaaaaaggaattcatgatgctgtacagaattttatttttaaactgtcttttaaataatatattcttatacggaaatgggtactgtacttcttctttggtagagttgtgtatgctgcttccggtaagttctctcatggagacgaaggacactgtgcttttcccccagatgtatcttagagcaattgaccagtgtgatgcggtgcgtacgtccctgtaaattcagcattaaatgtcagcacggtgccctgagtgcaaggacatgcacgggtcctgtgtttctgagcagagggggacgtcagtgccgtgtgtgggacatctggggactgaggcaggttggccagactgtaggtcgtgtgtcggagcaaacgcacccatgaccatggggacaacacacactgggtgctcatgtggaggaaggctggtgacttcacacttaaatcctcagataaggaaaagagacacatgtattcagcacgtctgagggtctctatctcgggaggagagacggccctcccttcctgcctttgttttggtaacaagcacaggggacattctgggtggcactgtgtccacacaggggacccagcccccggcttgttcatggtcaggctcttgttgctgggacagtcgcacccctgagctctcactgagaccgcccgcatgcggtggactcctggagacccgatttataaaaagcaaggaaaaggctgctggctgtgtcccctgggctgtgggctccatctcccctgcgctctagagacagaaccacctcccgaagcgcttcaccctacagagctcacctttaaagccactggcgtggtctgagcttagtaaacatttcatttctgttttgggtcactttccttggggcatttgtttccttttggtgaattccagaatattacttcccaccttcaaataattcattttttacctgtaaaattttccatctcgaatccagccgaatacagataagggaccttgatttctacaccccttcttgtttctgcttttgtttttcatttgaatcctattaaagccaatagatatggcaacgttggcaaaaatagaagcaaaacgtaggcgtgcggatattgatgccctccaccttcctgccagcctctatgggggatgattacctgctctcctcatctgtaacaaggctctttcaacagcaccttcatctgctacattacttggaatgcacatctcactaaacggtgcccctcatcaaactccatacaacacttccttgaattttactatcataaacagaaacaatcacatgcacacacatggacatgtatacactcctacacatcagcacacttcctctggttctaggctatactgcatcctgaaacaattaaatgactgagatccattaggggaggcatctagagagcatctactgttttttttttttttttgagacaggctggagtgcagtggcgcgatctcggctcactgcaagctccgcctcctgggttcacaccattctcctgcctcagcctcccaagtagctgggactacaggcacctgccaccacgcccggctaattttttgtatttttagtagagacggggtttcaccgtgttagccaggatggtctcgatctcctgacctcgtgatccacccgcctcagcctcccaaagtgctgggatcacaggcatgagccactgtacccggcctgacggcatctactgttagtcctggttggtgtgcagccagcctggtctccatgcacgggacccccagaaagcccaccaacccaccctcctgtcacacagagcagtccctgaggccccacggttggaggccacgtccaccctggtcagcctgcacacccagagcctgcccgcaccaggaggcagccacacggatgagctgaatcatgggctgcatgtggcagtggaggctcaggacaagacagatgtgcctacggccccggagagctctgggtccagcagcagaggcgttcccccaggcctgggggcatgcccagcatagggagtgagtgtgcagacacagggtcccacccccatgagcacaacccactgaacaagacgcccctctggggtgagcggcaccatctccacctaggatgatgtgtttccaagtgaactctcacccgacaatcagtattaagtcagcatgaagggtaaagatgtttacagctgagccacatgcacgtcaggagacaggagcagcaatgcctggggctttccacggtgagctcccagcacacagcaagcatgtcgccagaaagaacagaaagttcacaaagggagggccagcctgtgcacagcctagcaccgtcctgggaggccatcatcacctgtgctcctctgagaggacaggaagatgctgttttccacttttttctccccaagaccgtttattagcaattgaaggaacaacgcatgtatcaaagactggatttgagaaattccaacaaatctgccccctcgcagttgggagctggcatcgtgcaatcttcggaatgcagcctctggctctcccatcaaaaggcaacgcagccccctgtgatttcagctttgaccttgtgggtaataaaagaaggaaagaggaatgtctgctactggaatcctggatggggtccccgcggccgaatcccccctcccgtcccctcctgtgtcacctgtcatgtctcagactttgaccgcctcccgcagcttccttttattcgtaatgtctaaagccaacccaagcgtctttgccggctgacgtcttagccaaatcatgtgggaaacccgtgaagcagaactgaccgctgtgagggctgggagtacactgggcatctgaaatacttcagcccaggaaaacgtccatcagtggacaccgtcggttcccaggtggcctctggaacaggaaagcagtcaccccctcgtccgatcccacaggaaacctcattccactctagtggcagtggctggggctagatccccctgagccaggagacgacgggcagtgcccggacaaggctgtactctgtccacagctcctccactgtggctatgagggaggtttaaaaatctcagtccagtggggggggtcagccccctgcccggccagccgccccgtctgggagggaggtgggggggtcagcccccgcccggccagccgccccgtctgggagggaggtgggggggtcagccccccgcccggccagccgccccatccaggaggtgaggggcgcttctgcccggccgcccctactgggaagtgaggagcccctctgcccggccacgaccccgtctgggaggtgtgcccagcggctcattggggatgggccatgatgacaatggcggttttgtggaatagaaaggcgggaagggtggggaaaaaattgagaaatcggatggttgccgggtctgtgtggatagaagtagacatgggagacttttcattttgttctgtactaagaaaaattcttctgccttgggatcctgttgatctgtgaccttacccccaaccctgtgttctctgaaacatgtgctgtgtccactcagggttgaatggattaagggcggtgcaagatgtgctttgttaaacagatgcttgaaggcagcatgcgcgttaagagtcatcaccactccctaatctcaagtacccagggacacaaacactgcggaaggccgcagggtcctctgcctaggaaaaccagagacctttgttcacttgtttatctgctgaccttccctccactattgtcctatgaccctgccaaatccccctctgcgagaaacacccaagaatgatcaataaaaaaaaaataaaaaataaataaataaataaataaaataaaaatctcagtccaaaggctttcaccgtagtctgtctaagggacagataacatcgtctctctgaatttgggaggggactgttctctgttggtagccaaaaggggcccagcaaggtgctagggttccagtctccctgagtcctcaggcaggtcttcccagcccccaccctgggactccctgccctgctgcaggggaacgtgagggtcaggggtccccagattcctgggagctggggccggtgccctggcagaaacacggcctcaggcagggtccagggcctgtgggggtgagtcacgttgttatgggctgaattctctccccaaaacttacgtccaagcccaacctggtgcctcccagtaccgtatttggagacagtgcctttaaaaggtggttaagataacatgagctgactggggtgggccctgagccactttgactgagtcttacaagaagaggaggtcggggcacagatgcacatgaagggcgccagggaaggacagaccctgacacacagaggagtggggactcagcagaagccagccctgccaacacttgtctcagactttgagaggtaagtgtctgtcgtttaagccccccgccaagctcacacacacacacacctgtgtgcctcgctagggctgccccagcagactcacacatcacacctccctcaccaccgagtccctgggcagcaacgtgggcccggctcacaagcagtgctggagacagcttgagcttgggttgactgcgccagcatagcatgatctctctctctctctctcgctctctctaaggaaaaaaagaagataagaactagagagtcagaaatgtcatctctttctttcttttcttcctcctttctttcttgcactccagcctgggcaacagagtgagactccatctgaaaaaaaaaaaggaaagaaagaaattgattttattaaccaaaactagtaaaggggaagtggccagatagccatccatggcaaccacttcaattttggggaggaaggcaggggtttaagaaaggaaaacttggccgggcatggtggctcatgcctgtaatcccagcactttgggaggccaaggtgagtggatcacctgaagtcaggagttcatggccagcctggtcaacatggtgaaaccccgtccctaccaaaaaaaaaaaaaattagctgggcatgatggcaggtgcctgtaatcccagctactggggaggcagaggtgggagaatctcttgagcctgggaggcggaggttgcagtgagctgagattgcaccactgcactccagcctgagcgacagagcgagactctgtctcaaaaagaaagaaaggaaaacgtgataaggaagaaatacgagaattgggtggggtacaatgtctgtgtgtctcgagtggctgtcttgggtccccatccacctgggtctcaggctggcatcacctcaacagtggccaggtggtgaactagccaccttgatgtcatctgtggcactttgcagcttgatctccaggcttggtctgtctcaagattagcccctggaacgtctaagaaggtgcataatgagatgcgtgcataatgagatgcgcacatacagttagagaactgtgaagcgggtatagacagtgagaaaggcggggacgtgaagcctactttaaggctaagggaaaaggcttctgcagttcgcttcaaggttatatcttaaaatccaagagaaaggggaaaaaaagttaagatgcattttgaagttaagctgcctggttacaagtgaaaatacataagagtactggtttttttccggttaatcctaacttttctaatatattttgctagcagatatttaaaatctggtggtttagccaaagaatttgggacagcaagactatacaatcttccatccgctgcaaagagatgttcgttttttctcagcgtttctgagaagctggaaaacaaggtgagctgccgccttggacaccctcctcttaattctggttccttcctgctcgacatggggacgggacagtccgacgctccctctcatgggaatgtatttgcagacatcatatcatggaaaatactaaacacaagtgttgcctcagaagctcacgatgagccgggttcacgccggtgtaattctgcgggggccggaccctgaatctcatgcacgcgcggctgcgaaggcgacgcagcttctgcctctgagccgcctccttcgatacatcccgtgggagcgggagccacactgagcgccaggtctgcggccagccgggtgggaaacaggcgctgctgccagcaagctcctcccactctgctcacctgccccgaggttcccagaagttctcaatcagtaccatgtcctttccccttctcgaagaaaaacactgttggcaatggaacagcgcatcccattatcctcctgtcttcaccaggaacaggctccccagacagcagacactgttttccgcgagccggaggcagccagatttgagcccagataccgccatggccactcctgcgaaaccctagaaagccagggacatattcaggggacttctcttgctccaagaagccgtgcctggcagtcagcgcctgcacacaggcagctcccatggcaggagcatgggtggccaaaggggccaaggttctctgttgtcagtcctgcctcgcctgcctcccctccctcccctgcctctcctccctcccctctttcccgtccctcccctccctcccctctccccttcctcctctccctcctcttactcccctccctcccctccctcctctgcctcccttccctcccctgcctctcctttctcccctccctcccctcactcccttccctctctttccttctctccctctcctctctcctctcccttccctgcctgcatgaccttgagcttttcctctgttagtcccaggagcagctgcactgggtcaggagtttctgagcctggctggtcctcaggccgtctgtggacactgagacacgccccagccctgagattctgattctgtaggcctgttctggttgccaggtctgttttgccaagctgtgtgtttctggtgcaaggcgtagggtgcgcgctcgatggcctcctgggtgctgccatctgcccatctgtatctgcatctgatgcccgtgaggagacataatggaagcaagagtgtggggtgggaggccctaattgtttcagggaagtgtcccagcttggaagtggattcttgcaggggctctggtctggtggagaaagtggagaaggcagcctggggacgtggctgggtggggagtgggcgcaggcacagagccagcctgcatgctccttctctccctccatggacataaggacagtgaagtactgtccataccaccgcgtccaggcatctcacacgccctacacctgagaaacggagctgaaaaatgaatttgtgctgtccatccaccacatcagaaagacgagggacagtgatgcctagtgtgggtcaccagagaggcccacaggggacccctaacctgctacagttgtgctctagtcatttgtttcttggcattaggggcactttaaaccatcaaattaacaacctcaccatagtaacaacctgttcaatgtcaccaggggatcctaattggctcacagttaagcccctttcaaccttcgcactgtcgtggttgtcaggactgccaagccgccctcccatgcctgctcctcatgcctgtccactctacaagccagctgtaaaacccctgcccccaccctctgtgtcggtccatggtcaccaccctgtcacctccagcatcagtcacgcctccgtggtgggcgtgggggccccacccgaggctcccgggcatttctctgatggctaatgagactgatctttgatttttgatctgctcattggccattcagcttcctcttctgtgatgtggtggcctctgcccacattctgctggggcagtttgtcttttccaagttgatcgcaggtttttttctggttttttgttttttgtttttgagacagagtctcactctgtcgcccaggctgcagtgcagtggcaagatctcggttcactgcaacctccacctcccgggttcaagcgattctcccacctcagcctcccaagtagctgggattacaggcacctgccatcatgcccagctaatttttgtatttttactagagatggggtttcaccgtgttggccaggctggtcttgaactcctgacctcaggcgatccgcccgcctcggcctcccaaaagtgctgggattacaggcgtgagccacctcacccagcaatcagatcacagttctttttaaattctggattctgatcccttgcagttaactctatgtcctattacatcttctcccgtaataggtgatccaggaggctacaacaggctgaagtctgtgtgtcccacacattcctatgttgaaatcccaacccccgaggtattaggaggtggaggctttgggaggtgatgaggtcatgaggggagcgtgagactggtccccttgcaaaagggaccccaggaagctctgttccgccacgtgaggatgcacacgaaagcagcaccgcctgcagcctggagcagcaccctccccagaacccgaccatcccaccccgatctgcgatctgcggcttcggacctccagggctgagagagcccaggctgcagggcagaagccccactctccagcccccgcctgagctgcataaggcggccgcccttcctccacccccctctcttccgggtctctgcttgcgctggtttcctgttgttgctgtaacaattgccgacggagcaccacagattccctctctgacagccctgggcgtcaggagcccacaggccctgccacagaactgaagccaaggtgccagctggactgcttccttgccagggacctgcaggaaaattcatcctggccttttctgtggccttgcccatggcctcgcccatggcctcttcctctggttcaaagcccatcattccaacctctgctcctatcatcccctcccctctccttcgttccctctccactgcctctccctgccctcctctgctgccctcccgaaaggacccgaggtgatacaggcccacagggcagtctggcacagcctcccccgcttcaggtccggggtttaatcacatctacaaagttgctttggctgtgggagccaacgctcacacgttccaggaattaggaccaggaaatcctggtgggagggtgggggcagattctgtcctccacctggctgggggaccaagttggcagcggggcctttcctgactgccctgtcagaaactgcagcaccaccctaccccactccacctcacccctacctcaccccacctcacccctacctcaccccacctcacccctacctcaccccacctcaccccaccccaccctcatcccaccacacccccactccacccacccctactccaccccacctttaccccaccccacccctgcctcaccccacctcaccccacttccactccaacccaccttaccccgcccctactccaccccacccctacctcaccctcatctcacccgaccccaccccacctccactccagcccaccctaccccatccccaccccaccccacccccaccctcatctcacctgaccccacccccagtccaccccacccccactccccactttgggtacaaaaaccagaaaagcccaggcgaacggcaggaggaggtaggtgtcccggccccatgcgcgccacatggctggcttgttctgtctgtcattcccctactccttgttctgtccggggttcctccagccccacacctcagcatgcctgtgatgccaccctcagacagccgcaggccccgccctgtggtggtccccaaaattccaagtccgactccaatggcccgagaccggccaggctggcagtttcatctggttagggatgcgtgggctcctccacattccaccttttgagatgtgctgtaaccttctacctggaccccagacagacagggtcagccgaagccccaggcactcctggactcaggcacccgtgactggcagcagagcacgtcccctagccagggccacgtttgtcatgggatcgctggacattggccaccagaatggtgctggcatgctgaattggggtggttcaaagtgtctgtatagataggcaccctgcagaacctcccttcctaggatcctgaactccccagggcggccaggtggctgggacatgctaagggttcagtgaccatttgtgggatgagtgggtggatgtgagttgtggttgccaacctaaagaagcatggaggacaaaacccacagggcagattgtgctgggggacaagggggtcccctggtaggcaagtgtattcatgtgatgtgtgtgcctgggcacgtgtgtacattatgtgaggacgtgcacataccactcacctagccctgcttccagctaagagaaaggaagccagaaacatgcaaagatgccaagcaagcaccctgggcacggttttccagacctcgcagggaacagagtaaaagctaggaacgctgggcttcacgaaggagcagagggggcaggtgcggagggaggaggccggcagagagcaggtccctcctggagcagcgcgatcgggcgccgaggcctcatgcaacatccgacaactactcatggcaaggagaattctggactgactttctattgttttgattaaaagtaattttatccaaaaatccaaaatgtactggacgtgccaatcagaatggaacagaaggaaatgccgcactacctggctgcctctcccctcggctgctggtggctgcccatagacccctgtaaacagctgatgcatgtcccacctgcaccatagggcctggaggaagcggctgtagcaggactcgcagagttccccgtgcgtggccaccggccctgcctccatcgctgttgtctccccgcaggccaaggcgaggcaggtggggcgcactgcatggctctcaggggaaggatccactcagatgttccctctgcccatcgcctgcccaccttggactgcccaccatcctggatggagccactggaggctcccgtggcccacactggcccctccaacacccctgctaacctcaggcatggcccatcgctgcagctgtgttggggtgcctctgccatcaggatgttgcccacacagaagccacctgctctgcagagagcaggaactgggggttaggacctgcatgtgtcgttttggagacacgattcaactcacgacactcttatagtcttagctttcccatctgtcaacttctacctcttcagttgttgtgaagttttaataaaatgaagtcacgccaggcaagtgctttgcatgaggtctggtgctcctcgggtacccctcggggcctgcctcatctctcctgtgtgtggaggcatcgttactcctattccaagcaagcacgggtggagctgttagttgggaacgtcttttcctcaaacaagccaggatctgaggaaagcagagggcaggaactgtgaccaaaagagaacaacagactcagagtacatgtggagatctgggatctgccagcggggtctccctgagaggcctgggatagctcaggggctctacaaactgggtagtgtgacatgggagggggaaactgatggaaatgggcaagaaggaaaaggttgacagggaggtaagaacccaggagaacaaatcatgaccataacctacttggtcaatttcaaacctaaacttttgcctttgactgcctggacacaaaaggagagtgtgtcagctagccctggctgtgtaacaaacctccccaacacttagtggcttgaacaacaatgtttattatttctcacagttctgagggttgacaggcagattttttggtctgaccagcccggctggagctggctggtttacgatggcctcagccacacgtctgccacttcgtttgccagcagactgcagtttcaagcacacgtctctgtcattgtgtggcaggctaacaaggctcattcacacggtgacaggtggttcccagcagccagagaatgttaagtcctcctaagtctcaagcacttttcaagtctcagtatgcacggatccttacctctcatcggccacagcaaatcacatggtcaagcccaagtttaaaaactcgcttcacagctggacactgtagctcacgcctgtaatcccagaactttgggaggccaaggtgggtgcatcacctgaggtcaggagttcaagaccagcctggccaacatggtgaaaccctgtctctactaaaaatacaaaaattagcctggcatggtggcatgtgcctgtaatcccagctactcgggaggctgaggcaggaggatcgcttgaacctgggaggtggaggttgctgtgagccgagattgtgccactgcgcttcagcctgggcaacagcaataatgagaaaaaaaaagaaaaaaagaaagaaaaatcacttaatgacagaaggagctgcagagaatttatggcattttttaaattttttatttatttatttatttatttatttatttatttatttattttgcaatctaccagagtgaggaagatggctaaaagcaagattgggagtcattcttcaagcatctgtctttaaatgcccttttcagctttctctatcaccaagtccctgctgctttttctaacactttcaagagctacttgactccagggtcagggcacaccacaaccctttattataaagaacagctgaggccaggcactgtggctcacgcctgtaatcccaacagtttgggaggccgaggcaggtggatcacctgagatcaggagttcaagatcagcctggtcaatatggcaaaaccccatttctactaaaaatacaaaaaaaaaaaaattagctggacgtggtggcacacacctgtaattccagctactcaggaggctgaggcaggagaatcgtttgaacctgggacgtggaggttacagtgagccaagatcgcctgggcaccagagtgagacttcgtctcaaaaaaaaaaaaaaagagaaaagaaagaatagctgaaacgttaacttggcatccgatgctattctcctcgaactcacactgaaggattccaccttctaagactattgaaaccctccatgcggtgctccgagagactgccggagacctgctgctgatccagttaatgctaccccagcactgacggggtgttggttacaaccagcgtgagtcaaggagggagttagcacctaacttccaagactcaggagtgtgtaaaaaatgagtgccttacatctggtgttattttacctcaccagtttttatacataggtgtttattttagccagccatcaaagggaccttaaaaatgtaaagaattcttacacattctccttgcagcacaaatctgtaattaagggattctcaaaaacgagtgcaaagttttattctgagacccccagtgctcaccgaaattgtcacatttggccttccacatggtgggagagcagagtcactcagtttctgcgaagtttaaaggagatttgaagctttcaggcaacgctgaggaaggtggataacagtgttttacaagtgggagaaacttcaaattaaacaaagcacagccaggtgcagtggctcatacatgtaatccagcactttgggaggctgaggcgggagaattgcttgaacccaggaggcagacgttgcaccattgcactccagcctgggcgacagagacagactctatcagaaaagaaaaagaacaaaagaaagaaaagaaaatttacaaaataaatatccttacaaaaattaaaaataataataataaataaataaaacaggccgggcaagacagctcacactgtaatcccagcactttaggaggccgaggtgagtggatcacttgaggtcaggagttcaagaccagcctggccaacatggcgaaaccctgtctgtacaaaaaatacaaaattagccaggcatggtggcgcacgcctgtaatcccagctacttgggaggctgaggcaggaggatcacctgcacagccatagagaaaaaggaaatcatgtcctttgcagtaacgtgggtgcagttggaggccattgtctgaagcgaattaacgtaggaagggaagccacataccgcatttgctcacttccaagtgggagctgaacactgagtgcacaggacgtaaagaggacagcaacagacattggagactattagacatgggagggaggagccagggctgataaacacctactgggtactatgctcagtacctgggtgacgggatcagttgtacaaacatcagataaacacctactgggtactatgcttagtacctgggtgatgggatcagttgtacaaacatcagcatcacgcaatgtacccaggtaacaaacctgcacatgtacccccgaatctaaaataaaaattgaattttttttaaaaaaagaacttcttatattctaggcatagtatgttcaatatatataatggcaaatgaagaaagatagtgttctttccctcatcaatcctaaaataatatgaatcaaaaaattaattatgggccaggcgcagtggctcacgcctataatcccagcactttgggaggccaaggtgggtgaatcacctggggtaaggaattcgagaccagcctggccgccatggcaaaaccccgtctctactaaaaatacaagaaaattagccgggcgtggtggcgggtgcctataatcccagctactcgggaggctgaggcaggagaatcgcttgaacctgggaggtggaggttgcagtgagccgagatcgcaccactgcactccagcctgggcaacaagagaacacttcatctcaaaacaattagattaaattaaattaattacggcaagagtaagcagcattgttgtttgttgacaaatggctttgagttctaagactgatcttcatgatcatatctgtgtattaatgtatgttatacatgaatattcaattcatgtaagatttctgttcactacgtgggttacacaagacacaataaagcaaaatttcaaaataagaagaaagcatatagagagatcccatgtgccgttattctacatactcgtcctctgttggatatagggcttgcaaatagttcctcccagtctgtaataaaaggccccaggtctcctcaatgctcacatcttctctaacatatcatgatgtcacaggcaagaatggacagtgacacacacgagattcagaacactccccagccacctcccaactcacagacatccctccagggatccacaggatccctccagtgccccttgtaagacccgtttgtataaccattgaggacatccaggctagtccactgtttggctttgacaggtaaatctgctaggaacattgatccactggttgttatgaacatgagtctttgcctgtctgggcgtgcccaggagagcaatcctggggctgtatagtaattgaacatggagttttgtaagaaactgccaaaccgttttccagaacggctgcaccttttacattcccaccagcaatgcacaaatcggttatctttttgttactgacatctagtttgattcccctttggtcaaagtacacattctgtatgatcccaactcttttacatttattggggtttaatttatggctcattatgcaatccatcttggtacatgttccatgaacgtttgaaacaaatgtgtacagccagtcatggtagctcacgcctgtaatcccagcactttgggaagccaaggtagtggattgcttgagcccaagagtttcagaccagcctaggcaaaatggtgagacccccatctctacaaaaaatacaaaaattagccaggcatggtggtgtgtgcctgtagtctcagtgggaggctaagggaggaggattgcttgagcctgggaagcagaggttgctgtgaactgagatcgcaccacagtgctccagcctgggcaacagagtgagaccctgtctcaacaaaaaaagaaagaaaaataaaataaaagaatgcgtacagtgctgttgttgggtagagttctgtgaatgtggagaaggtcatgtagattgacagtgtgttgagtgcttctatgtccttgtttgttttatgtccagcaacaatggcaatggtctttcactgagggctgcagccccaccagacagtcatctccatgcagccatctgctccacatccaggtgagtctcctctctgccatttcagacctaagggaaggcaggaaaggcacagctgcctgctctccctagccctggaatactgagttctctgccccctgcccacagctttgtaaatagtcccattactaaactttcctcagtgacccagttttccgtgatatctctggcccgctgtggccttatgacagatatcccagggggctactgccattacctaggactcctatggaagaaattcccactgaaaatgagctcacagagtgagtccattaggctgtggctgtaataagatgcataacggagacttccatttcctcttagaatgtagaaaactgcaaagaacattgctcccacactaacaatgagaacagtcaggtaatcctcaacgccactggagaggtgaatcacaggggaacaaagtgaactgaattccaaaaaggatgggccccttcaagcagagagagagcacatgaactgctttatttttgacaggtgtcaaagaaaaaaatattcaataacacttgtgtcttttttggttttggggttattttgttttgttttttgttttttttggggggggagggtctcacatctcactctgtcacacaggctggagtgcagtggcacaatcatagctcactgcagcatcaacctcccgggctctagtggtcctcccacctcagcctcccgaggagctgggaccacaggtgtgtgccaccagcccagctaatcatttttctttttgagagagatggggtctggctatactgcttgaactcaggaggtggaggttgcagtgagccgagatcgtgccactgcactccagcctgggcgacagagggcgactccgtctcaaaaaataaaaataaataaataaactgacttagcaggattctttgctaaagctggactttacaagaagtgcacagatggtcctaagagaagtttctggagcttgactaaattttggtcaagcagataatcttattacagagtatagaagaaacagtggccaccatatggatggacaagaaagattcagtaaaattcttaaaggcgggccgggcgcaatggctcacgcctgtaatcccagcactttgggaggccgaggcgggtggatgaggaggtcaggagttcaagaccagcctgggcaacatggtgaaaccctgtttctaccaaaaatacaaaaattagctgggtgtggaggcccgcgcctgtaatcccagatactcgggaggctgaggcaggagaatcgcttgaacccgggaggtggaggttgcagtgagccgagatcgcaccattgcgctccagcctgggcgacagggcgagactctgtaaaaaaaaaaaaaaagaaaaaaaattcttaaaggccaatttgtgtgacagatggggagagctggggtcccatacagaaggggatcttgcactcacttgtaaacgctccaccatgggcctttaagaaagagtggggactggccgggcgcagtggctcacacctgtaatctcagcactttgggaggctgaggcaggtggatcacgaggtcaagagtttgagaccagcctggccaatatggtgaaaccccatctctactaaaaatacataaattaactgggtgtgctggtgcacacctgtaatcccagctactcgggaggctgaggcaggagaattgcttgaacccaggaggcggaggctgcagtgagccaagatcgcgcctctgcactccagcttgggcaacagagcaggactccacctaaaaaaagaaaaaaaagaaagagcggggacagggcaggtgatgacagacagcccttgtgggtgatgtggatgtgcgagaggggatggtgctggggcaggtaggagccccagctgctccctggacactcttacaagcagaagacttgagctgctgaggaaggtgcattaaaccgtcttgctcccagggcataagcaaagctccattgattctagggcagaagaaagggaaaatcccatctgccctcagttaatttagaaagtttatgttgtgaaggttgaggacgcgcctgtgacacagcctcaggaggtcctgaggtaaagaaaggcagatttggccaggtgcggtggcttcatgcctgtaatcctagcattttgggaggccaaggagggcggatcacctgaggtcaggagttcgagaccagcctggccaacacggtgaaaccctgtctctactaaaattacaaaaattagccaggcatggtggcatgtaccttacaacacgtgcccaaggtggtcggggcacagcttggttttatacattttagggagacgtgagacatcaatcaatataggtaagaagtacattggttcggtctagaaaggcaggacaacctgaagcaaaggcaggaagactcgaagctgggagggggcttgcgggtcacaggtgggtgagagagttgcattcttttgagtttctgattagcctttccaacagaggccatcagatatgcatctatctcagtggtgggggtgggggtggtgacattgaatagaatgggaggcaggttggccctaagcagttctcagcttgacttttccctttatttatttatttagctagttagttagttatttttgcaacggagtcttgctctgtcacccaggctgtagcacagtggcgcgatcttggctcactgcaacttctgcctcctgggttcaagcaattctccctgcctcagcctcccaagtagctggaactacaggcacgtgccaccacgccaggctaatttttgtatttttggtagagacaggtttcaccatgttggccaggctggtctcgaactcctgacctcaggtgatcagcctgcctcagcctcgcaaagtgctgaggttacaggcgtgagccaccacgcccagcagacttttccctttagcgtagtgatttgggggtccaagatttattttcctttcacactatcttgtttccagggcgtaagcgaagatccactgattataggggtgaagaaagggcaaaacctgtctgccccagggaagggatggaaaatactcttcctccaggaccttggcaaaaatccaccccccgtgaaggaatggtcaagggtgtggacatggggccagatgggaaactgccacccaagaccaaccacagagaaaaggtgctgcggggcgccatacagagaggagagcagggatgcttggagatggcctccctctgagctgcaaacctgcaggcacagctgaaagctgggggcaggggggtgggtaggagcctgagaaggacccccggcatgaggtggctgcctcccacagcttgaggaatttgaagtctccagtgcggtgcactgagatgaccattacaacaaacccacacccagcccaactgctgactagatggtggtctcaccgcccccaccaagaacctggagaagatgagacaggccaatttccaggcacaaggagtctgcctacttgttctagtgatcaccgagagggcactgtagatgtctccagctctagttgtggatttgtttatttcagtgtttgttctttccaatttttttgtatattttgaagctctgttgttaggtatacacacatgtaggattgtgatgtcctaatgaagacttcatcgcgggtgcaactggctggggccagcgtcatggtcagtaaaaggatttaccggccaggcacggtggctcacacctgtaatcccagcagtctgagaggccgaggcaggaggatgacctgaggtcaggagttcgagaccagcctggccaacatggcgaaaccccatctctactaaaaatacaaaaattagcagagcatggtggcgggcacctgtaatcccagctactcgtgtgggatatgatgaggtttctcttcaaataatctgatcaatcttttattctttaattcatagtgcctccccaacttctcctttttctccttttttcctcttcgcctttgttagatgcccaggcatgccatagtactaggcgttatcagtaccagctccattcctttccttatttggaaagaggactaactttctagctcattacagacaccccttccccttcctctccactttcttttatgtgcctgccttatgtaaaaaaaaatccaatgtttagccaaccaggattagtttagattgtaggacctgaccccagccaatggggaaagggtacaggggcggggtaggacttgcatcaggaataaaggctcttgtgccccttgttcaggtgtgctctcatggccattggccaaggaggcacccctctgcgcagaaggaaaattgctttgctaagaatcctttgttcgagtgttcaatttccttaggattttgagcattattcctaacactcaggaggctgaggcaggagaatcccttgaacccaggaggtggaggttgcagtgagctgagatcacaccactgcactccagcctgggtgacacagcaacactctgcctcaaaaaaaaaaaaaaaaaaagaatttaccaagacagtcgtaggtaaagaaaggcagatttggccaggtgtggtggcttcatgcctgtaatcctagcactttgggaggccaaggagggcagatcacctgaggttaggagctcgagaccagcctggccaacatgatgaaaccctgtctctactaaaattacaaaaattagccagccatggtggcatgtacctgtaattccagctactcaggaagctgaggcaggagaatcccttgaaactgggaggcggaggttgccgtgggccaagatcgcgccactgcactccagtctgggtgacagagtgagacttcatctcaaaaaaaaaaaaaaaggcagatttatttgagaaaatacgaaggtgcgttgcaaggatgtaacaggcagcacagcagagaaggagctgtctgcaaagaggcaggggctggagggaggttctgcaggttcgtgctgcaggggctacgtcctgagcgaggtagttgtgccagagggttgcctgtggttagccacctctcagagtaattcttctccctcacctgggacctcttcctcattcttgcttacttaccttatcaggactccacagacttgaccccttgatctttatgcaatatccctctttatccgtggtgtcaacctaaacagagaggggctttctaaaagaagctgaagtctatttgggattggagcactgctgtggaaatccgtgcaccatcatacactctgtgttactcagggagggaacacagcgagacgacgggaaaatgaggagggtcatatcattgttttgagataattatccttagctacgaagaccagtaacaaaggtggcaccaatccaaggttgggcaggcagtcgctgggcagatgtcctcacagaaggacctttgatgtgaggttgcaatggcctttttgcaaggctgtgggttttgcattcttctgggatagctgtgctgtcagacattcatgctcaagaaccgtctcttcctggtcttctctggcttctctgtctaggctttttttttttttcctttgtgatggagtttcactcttgttgcccaggctggagtgcaatggtgcgatctcggctcatcgcacctccgccttcgggttcaagcaattatcctgcctcagcctctggagtagctgagattacaggaatgtaccaccacacctggctaattctgtatttttaatagaaacagggtttctccatgttggtcaggctggtctcgaactcccgacctcgggcacctcggccttccaaagtgctggaattacaggcgtgagccattgcgcccggtcacaaggtttttggtttttgtttttgtttttaacacaagagattccattttgattctgacaactttcacactggtaacatttcttgtaccaagctttgtttaatatgaatattgcgttccagctgattttatagtgtgtgtgtgcacaacatatcttttctcatccttttatttttaacctattgtgaaaggaaaataaatcttggggcccccaaatcactaagctaaagagaaaagtcaagcagggtactgcttagggccaacctgcctctcattttattcaaagtcatccctctactcactgacacagatgcatatctgaacgcctcctttggagaggcaagtcagaatctcagaagaaaacaaccttttgtctcttatctataggtggcctggaagccccctcccctggcttccagtcctcctgcttttgctctgagtagtcccgcctttccagaccgaaccaatgttcatcttgcgtatgttgattgatgtctcatgtccccctagaatgtataaaaaccaaactgtgctctgaccaccttgggcacgtgtcgtcaggacctcctgagtctgtcacaggtgcgcatcctcaaccttgacaaaataaactttctaaattaactaagacttgtctcagattttccaggttcacactatctatgtctttatacttaaaatgagtttcttttagataacatatagatttaaaaaaagcatccatgaaccatgaaacaggttatcgtttttaaaggagaatattttaaagcaaataaaaatgttactatagttattatgatccattgacataaaatatttgacataaggattatacagtaaagcagagaccagtgctgtaacacagaagataaagattgaaaaagtaacgaaaactttagataatgtagacaaaaagactcaaactttgtaaaatattttaagacatttattctgagccaaatatgagcggctgtggcccatgacgcagccttcaggaggtcttgagaacatgtccccaaggtggtcagggcacagcttggctttatatattttagggaggtgtgagatgtcaatcaaatatatttgataaatagattggttcagagaggtggggcaactcaaagcgggtgggaggggagggtggggggcggggcttccaggtgaacgtaaacattttctagttgacaattggttgagcttctctaaagacctgggatccagtagaccaggtacggtggctcacacctgtaatcccagcactttgggaggccgaggcaggcagatcagaggtcaggagatcaagaccatcctggctaacacggtgaaaccccgtctctactaaaaaatacaaaaaattagccagacgtggtggcgggtgcctgtagtcccagctactcaggaggctgaggcaggagaatggtgtgaacccgggaggcggaggttgcagcgagacgagatcgctccactgcactccagcctgggtgacagagcaagactccgtctccaaaaaaaaaaaaaagacctgggatccatagaaaggaaatgctcaggttaagataaaagattgtggagaccaaggttcttctgaagtctcatagtagctgcccttagagacaatcgatgacaaatgcttcatattcagacttttaaaaggtgctagactctcggttaatctcttcaggattgggagggccggaaaaaaaaatatctggctatgtgaatagagattctttacagaagcagatcttcccccacaaaggatggctttgcagggcatttcaaaatacggcaaagaaacatgttttggggttaaatattttgatttttttccttgtcttataatgttatgccagagtcagattggaaagtcagtaatgatatatacggttaaataaaaccatctgatgagaatttatggtttgcagggcatgactccccagaccccttcgataggaatttgggcaagataaaaaatcagagcttagtcctcaaaaagtttaagaaaatagagtaaggagctctaacatgcattttataaagagaaaatggagaaaatgaaagagacaatattcaaaggtaagagaacttccaggccaggtgcaatggctcatgtctgtaatcccagcactttgggaagtcagagtgttgtaagtaaagtttcggtgccacaaaagaaattttcttgtaattcccaacaaggcaagtaacttctacagaagggtgcgcccttacagatggagcaatggtgagcgcacacctggacaagtgagggaaaggggttcctatttctgatgcacatggtccctactgctgtgtcgttcgcctattggctagggttagactgcacagaccaaactaattacgactggctaatttcaagagagtgatgaggtgagtgggttggcaaaaaaaacggtaatgaaatgagtcagggtggagaatgaatcggaatgagtcggtggagtaggtcatcagaatgagtccaggtggagaatgagtcagggtggagcaggtaattgaaaaacgttgctttacaaggaagttaagtttaaaagtagaaggcaaacaattgaacatactgacatattaattctttgaagagaaatgtagaattcatatttaacaaaagcaggaggattgcttgagtccaggagtttaagactggcctgtgcaacatagcgagacctcatctctactaaaaattttaaaaaattagccaggcatagtggcctgcacctgtagtcccaactgctaggagggctgaggtgggaggatcacttgagctcaggaggtggagcctgcagtgcgccgtgatcgctccactggactgcagcctgggtgacggtgagaccctgtctcaaaggaaacaaaaaaaggagaacttccagacttggggtaaaaaactgtccattggttggatactatgttttgctgctggttatagaaaatgaaaataagactgatttatcttgatagcatgaacatgacagaggcttatttttcctcatgttgagaagactgaagagaagcaagcatgaggtcaaatactaagcaaacctcttgccagtcttgcagctcctcaagagcctgagagccacctctttggtggtggtggtggtggtggtggtggtgtttgaggtggagttttgctcttgtcgcccaggctggagtgcaatggtgcgatcttggctcactgcaacctctgcctcccaggttcaagtaattctcctgcctcaacttcccaagtagctgggattacaggcatgtgacaccacacccagctaattttttatttttagtagagaacggggtttttgtcatgttggctaggctgttctcaaactcctgatctcaagagatccacctgcctcggcctcccaaagtgctgggattacaggcatgagccactgcgcccgttcggaaccacctctctgaatcgtcaaggaagctgacaccaccttgcggtttcctagagtttcctttagactacgaaatacggtgagttgaccaattgtaccttgaaaacctgaaggccaggggttgtatctttcacacgcgtccgtgtgaagagaccaccaaacaggctttgtgtgagcaacaaggctgtttatttcacctgggtgcaggcaggctgagtccgaaaagagagtcagtgaagggagataggggtggggccgttctataagatttgggtaggtaaaggaaaaaggggggttgttctctggcgggcaggagtggggggtcacaaggtgctcagtgggggagctttctgagccaggatgagccaggagaaggaatttcacaaggtaatgtcatcagttaagacaaggactggccattttcacttcttttgtggtggaatgtcatcagttaaggcaggaaccggctatttaaatatcacttcttttgtgattcttcagttacttcaggccatctggatgtatacgtgcaggtcacaggggatatgatggcttagcttgggctcagaggcctgacattcctgtcttcttatattaataagaaaaataaaacataatagtgttgaagtgttggggcggcgaaaatttttggggggtggtatggagagataatgggcgatgtttctcagggctgctttgagcgggattaggggtggtgtgggaacctagagtgggagagattaagctgaaggaagattttgtggtaaagggtgatattgtggggttgttagaagaaacatttgtcgtatagaattattggtgatggcctggatatggttttgtatgatttgaaaaaagaacggaataagacaaggagaaaaacaggtattaaaggactaagaattggaaggacccaggacatctaactagagagtgcccaaggaggttcagcatagccctgccagcaaagattatttatttactttaagagggagttaagagtggtgatttagggatagcaccagtagatatcagctgtgatggcttggagaaacagtgtaaaccagcagtgtaaacaagagcagggcatttatgagtagttgagaacggcgaataggagtatgattagacagaagatagtagggatgacaagttttgttttttttgcgggggggagggcgccgcagtccaacttggtctggtgtctggaatgagactggggcctaataaaaaggagcgtctatacaggagctcaaatgggctgtaccttgtggcattctgaggacaggcctgaattctgaggtcaagtggtaaaagtattgtccagtcctttttaagttggtggctgagcttggtgaggtgtgtttttaaaagaccattagttcactgaataagagcttgagaaactgcttggctgatttgactaataaaggctggtccgttataggactgtatagaggtgggaaggccaaaccgaggaattatgtctgacagaagggaagaaatgaccgtggtggtcttcttagaccctgtgggaaaggcctctacctatccagtgaaagtgtctacccagaacaagaggcattttagtttcctgactcggggtatgttgagtaaagccaatttgccagccctgggcgggggcaaatcctcacgcttgatgtgtagggaaaggagggggcctgaataatccctgaggaatagtaggatatcagatggaacactgagaagttatttccttgaggatagatttccacgatggaaaggaaatgagaggttctaagaggcgggctagtggcttgtactatagcatagcctgcctttgctggtgtgtggcaattaggcctggtggaagtgccatcaataaatcaagtgtgatcagggtgaggaacaggaaagaaggaaatatggggaaacggggtgaatatcaggtggatcagagagatacagtcacgggggtcaggtgtggtatcaggaataatgtgggaggccagattgaagtccacgccaggaacaatggttattgtgggagactcaacaaagagtgagtacagctgaaggagccgggaagcagaaagtatatgtgtcaggtgtgaggaggaaaacagattttggaagttatgagaactgtagagagtgagttgagcatagtttgtgattttaagggcctctaaaagtattagtgcggtggtggccgccgcatgcagatttgagggctaggcaagacagtaaggtcaagttgtttggataaaaaggctacagggcgcagttccggttctcgtgtaagaattctggctgcacagccctgcacttcggctgtgggtaatgaaaagggttgggatgagtcagggagagctagcgtgggggccaactctaaagctgtcttcaaggaatggaaagaggagtggggaaaggatttaggatctatgggctcagctaggtttccttttgtgagtttatataatggttttgttaggatggcaaaaccaggtatctaaagtcgaaagtatccaaccatgcctaggaaggaaaggagttgttgttttgtagaaggtgttggggtttgagagatcagtcggacacgatcggcagggagagcacgtgtgtttttatgagaattacgctgagataggtaacagatgaggaagaaatttgggcttgactgaagtaatgggggctggctgtgaagccttgcggcagtacagcccaggtaatttgctgagcctgatggatgtgagggtcagtccaagtgaaagcgaagagaggctgggatgaagggtgcaaaggaatagtaaagaaagcatgtttgagatccagaacagaataatgggttgtggagggaggtattgagaataggagagtatatcggtttggcaccacggggtggataggcaaaacaatttggttgacaaggcacagatcctgaactaacctgtaagccttgtctggttttaggacaggtaaaatgggtgaattttaaggggaatttgtaggctttaaaagcccatgctgctgtaacaggcgagtgataacaggctttaatccttttaaagcatgctgtgggatgggatattggccttgagcagggtaagggtgattaggttttaatgggatggtaaggggtgcatgatcagtctccaaggagggagtagaggtatcctatacttgtgggttaaggtgcggggataggagaggaggatgtgaaggaggctttgaactggggaaaagggcagcaatgaggtgtggctgtagtccaggaacagtcaggcaagcagataatttaaagtgtctcggcctaataagggaactgggcaggtggggataactaaaaaagagtgataaaagagtattgtctaagttggcaccagagttttaagaggtttagaagcctggccgtcaatacccacaacagttatggaggcaagggaaacaggtccttgaaaagaaggtaatgtggagtgggagcctccgtattgattaagaaggggacggacttatcttccaccgtgagagttacccagatcgtctgtgatggtcctgtaaactcccgaggtgatcgggcagcgtcagtcttcagctgctaagccgagaagatctgggaaggagtcagacagccttgggccagagttccaggcactctggaagtggctgccaggtgagttgaacagcccgattttcagtggggtcctgcacagatgggacatggcttaggaggaatcctgggctgtgggcattccttggcccagtggccagatttccggcacttgtagcaagctcctgggggaggagtttctggaggaacccctggcagctgcggttcaggcatttggagttcttgtgtgctggagatgtggctggggtttgtctcacagtggaggcaaggaattgcaactcagaaatatgttactacttagctgcctctactctattgtacaccttgaaggtgaggttaattaagtcctgttgtggggtttgagggccggaatttaatttttggagttttatttaatgtcaggagcggactgggtaataaaatgtatattgagactaagacagccttttgaccttttagggtctagggctataaagcatctcagggttgctgccgaatgagccatgaactgggctgggtttttcatatttgatgaaaaagagcctaaatgctaactgattttgggagaggtcggataaagaaaagggagcattaaccttgactatgcctttagctccagccacctttttaagaggaaattgctgggcaggtcggggagggctagtcgcagaatgaaactgtaagccagactgggtgtgaggaggggaggtgataaaaggattatggggtgggggagcagaggctgaggaagaattgggacctggctcagcctggcaaggagcagcctggggaggaggcgtgaagtcagatgggtctgtagaaaaggagaattagaaaaactcagtgacgcttgggattgggactgagaggacaggcgggagggaaagaaggaggatttgggacatgtcacattgggaacagaggctagggagggaacaatgtgtaaaagaatgcctggacgtcaggcacctcagactgtttgcctattttacgataagaattatctagatcttgtaggatggaaaaatcgaaagtgctgttttctggctatttggaaccactgttgagtttgtattggggtcaagcggcattgcagaagaaaataaggcatttaggtcaggtgtgagttgaagaggttttgagttcttgagaacacaggctaagggagaaggaggaggaatggagggtggaaggctgcccatagtgaaggaggcaagcccagagaaaagagagagtagagacacggagagaaggggttgaggggttcttgccccctagaaaagcggagaaggggtagagacacggagagaaggggtcggggggttcttgccccccagaaaagcagtacttgccgctaagggtgaaggaccaaggcaggtgtccccgcatggtcagacacctctgaaatgtgggtgaataatcaggcaggcgtccctgtgtgattaaacaccaagggaagattgtcttcccgagtctgtgactggcgccagagttttgcgtccatggataaaacacgtctcctgtctctatgagaaaagaaaaggaactgaaattaagagaagggagagattgaagtgtggcaccaagattgaaaggagaaagagggtgaaggatagtgagagaggttggagaagagagtaagaagaggccacttacctgatttaaaattggtgtgatgttccttggtctggttggtctgaggacctgaggtcgtaggtggatctttctcatggtgcaaagagcaggaggatgagattgatctcccaagggaggtccctcagtccgagtcatggcaccaaatttcactcgcatctgtgtgaagagtccaccaaacaggctttgtatgaggaacaaggctgtttatttcacctgggtgcaggcaggctgagtccgaaaagagagtcagccaagggagataggggtggggccattttataagatttgggtaggtaaaggaagaaggggggttattctctggcgggcaggagtgggggtcacaaggtgctcaatgggggagctttttgagccaggatgagccaggagaaggaatttcacaaggtaatgtcatcagttaaggcaaggactggccattttcacttcttttgtggtggaatgtcatcagttaaggcaggaacaggcaatttaaatatcacttcttttgtgattcttcagttacttcaggccatctggatgtatacgtgcaggtcacagggtatatgatggcttagcttgggctcagaagcctgacagtatctaatccactttgctatacaaaggcgtgagattcctactgtctttccaatcctttgagtggattcctgggatgcacattacattctcgttaaatgcttctttgataatgcaatggcttccttcctcttctgctttgtggagaggttttcttgggttgggaggaggctttgtttctaattctgcttccccagtacagtcttggctggtggagcagctttcccatttgtcagcgtttcaagtccttttatgtttctgcgtcagtttccttaatatgtggcattgtggaaacaagcaaagaccacctgcctaagaccaagcacgcgccgtgtattccgagctggctctagtgagggggccacctccaccacctgcctttggcagagactcagggaaggcatgggggaagcttggtgatggacgacagaccccggggtgcccggatgaggcctttttcaaaaggaagctgggcaggctcgtgggagcggacatcctaggggtgcatatttgactttctctagttagtccaaaattggaagcagggacaaaaatgagggaagctgacagttattaatcaaatcctgggcagtttggaccaattgttagaggggtcattgtttggcttccctgaccagttacctgtggtaacaggcttactacagagctgacttagagagagaaggctggctcccggggctggttacaggggatcacaggttggtttcctgagctggttgcacagattataattcggggttctgtttttatatgaggtctgaccattgttcatttgtatattcagtttctcaatatttgccatcaaggtgacctcatggtcctaatgtagcaggacgagccgcggacaaaatccctcagacactgagatagtgaagggagtggctttaatcagctgggagcatgggcaggctagcgtcttaaaatccgagctccttgggtgctcaacttctgtcccttttaagggctcacaactctaagggggtccgcgtgagagggtcgtgatcgattgagcaagccagggggtacgtgacaggggctgcgagcaccggtggtcagagtgaaacagaacagaacgggaggtttcacaatgtccttccatacaatgtctggaatctatagataacatcagttgctaggtcaggggttgaattttaactaccaggcttaggtcaggcaggcccaggcctggtttcaggtctggttcctaggcaccgggctacctgcctttagttttgcttctctttctttttctgagtataaaacaatataaaacaatatgagagggtctctctcgtccctcactaatgtggtaggagttattaagaaattattttaggcagataggaaaagttttcatttcttttaaagcagctccaaaaacatttcttgtctagaaggatagcagggtggcaacctttgatatgcaaatggaggatattagaaactgggtccacctaacatggcagttctcacggtgtcctcttgcccttgcccccacatgtgcctggcaacatgaccgcccccacagatccccacgtgtgtagaacatcatggcgctctgcatttgcatattaaaaggctagggtgggagggtcagctttttcacaggccatgtgaatgacatgcctggtcaaaccaatgacctgagccctgtgcaaatcagacgccacctcctacggtctctacataaaactggctggtatccgtggcacttggggtttcctctttaggctttggagtccccctccctctgtctccgtatgagggagcctcttccttctgccttttctttcttgcctattaaactccccgctctttatagccattctacatgtgccccatgtcgttttatctaaattgcacaagacaagaacctggtgttcctccacccatcggagccgtatcactaataggccactggagatccagccattgtgaccacattccaggcaggaagaagaaagcagaaggcaaagagcacgcctcccaagtgaatccctatacaggttccacccaaatgcatttgcttccatctctctagccctctctgccttcaaggatgcggggaaatttgtttactggcacaaatcatgcccccaaaacaagaggacttctgttgaaggacaaagggacgctggatattgcacagggaaccaacaatcttgttcacaccttcagcctgaaaaattagaaaaatagacccaggaggaaaacacatttatgaagaatgcatcactgaatatcatcttgaatgtattcttcaatacgaaataattcttttaagacaattactttaataaaggattggttgacagtcacgattatgtgctcaaaatatactcttctgatgccttctcaaatccccctgtctttactccccacacaccccatctccagggcactaaggcagagacagaatgaagggtcagtgtgctgatagaaacacaagttgacgaccacccaaggaaaacgaattagttcaaagaagcaatacattgggaagttggtcatttggcaaattggctcttccaagaattggctttttgcaattgcactacagcaagtgagtgagaaaagcaaaagccccatgggatggggaggaagatcttccctaaagactgcagggggccttcctggggggccagagatcctcttccaagttcggtgaggtccccgggactggagccttgagtctaccgcagagtaatgactccctttaaactctatcatctgtagccgctggaaatgattaaatgaagcaaaagctgaaaatcattgagttcaggagagactgtgtcctaaagacacgcaagggaacaagtcctttgcatgtttgagactggagtgtgctccagcagcttgggaagcaggggcgcctcgctggggaaccacattacaggagggaaggggaagaataagggccttaaaaagcctttcacagctctccagggtgggcagcttttaatccaatgcatcaaaagttctcaggatatgagagcaaccattatgtgaaggacccaaatgctgcaagcacacacacacatgcacatgcacgcataggcacacacatgcacacctacaggcacacacaggcacgcacacacacgtacatactcatcacaggtacatgcatgcccaggcacatacacacatgcacaggcactcacacacatgtacatacacacatgcacaggtacacatgcacaggcacatacatgcacacacacaggcacacactcgcacacgcacaggcacgcacgcacactcacatgcacacacgcacaagcacacatacacatgcacacattccactgtctttccttccctggggttctccatttcccctgctgctagcagtggatcaggagatgctttctttccgtttgcactgagatttgctcctcacttctcttgctctggagctgcgacgtcctggggaagcagctgtgcgcagtagttgccctcccctgagcgagctgtcagtcccccttgcagaggacacacatagtgacagtgtcctcctgcctctccccacaggaaaaacaaaattgtcattcctccaccagagattcacttttctccattagggaactgtccattattaaaatgcaaggcggtgaccgccagttgataaaaggatggagagtgcctccgaaccctcctgggagactgggaaatgggaaaccccagggagggaaagggaggtggtgccggtcctgctttgattcaatcggagcaagaatacttcaaaggaagaatagaaaaatattgggttggaagctttctaaaaaacaaaaagcaagcatggatgaatagatgagtcattgacaatttaatgggaattagctcctctaatcatttctaattgcaactgacaagaaagggttttgatgcagaagaaagcagatattttgcaagggtggaaccctgggtgattctgtttgggaactgctgactggagcgggaagggaccgccaggggtgaggaggaaacacttgggtggaggctgcaaaggaggctcccaggccctagcttcgggctttcccgcacaggggcctgccgccctggtgatctcccttgggccagcagggactctagactctgcctctacagccagatagctgggtttacattcaaaatctattctttggctgggcacagtggctcacgcttgtaatcccagcactttgggaggctgaggcgggcagatcacctgaggtcaggagttcgagaccagcctggccaacatagagaatccccatatctactaaaaatacaaaaaaaaaaaacattagccaggcatggtggcgtgcacctgtagtcccaactacttgggaggctgaggcatgagaatcacttgaacccaggcgttggaggttgcagtgagccaggatcatgccattgcattccagcctgggtgacagagcgagactctgactcaattaaaaaaaaaatgcattatttgcttaacctcctgggcctcagctgccttcattaaaaggggtaagagtcacatcaccaccttgttgtgaagattaaatgaaatcatgaatgtgcacccatgcaggggtagggcatagcgccctatgcagacatagggcatccacggaaaagtcagcttttactgtcctcacacagtgggagggaaatgtttggtttttgagggttttttttaatttttttttttttttttgagacagtctctgtcacctaggctggagtgcagtggtgctatcttggcttgctgcagcctccacctccagggctcaggtgattctcccctcagcatcctgagtagctgggatgacaggtgcatgccaccaagcccggctaatttttgtattttttgtagagatggggtctcactgtgttgcccaggctggtcttgaactcctgggctcaagcgatccaccctcctcagctttccaaagtgctgggactacaggtgtgagccaccgcacctggccattgttttattctagatcagatgatgcccacctccaggactgcctctgtactgaccacactccctcttggtatggtcatccatgggtcaggtgtttggtcttgcataaaaatgtgtctatgtgtggtaaaatatatactgtataacataaattttatgattttaactatttttagttttagggacaaactaccccaaaaagcctcttggtactgccaacattccccccagacccctccgtgctgcccacccctccctgaaagctttttacatttttaagcccttatctaggcaccgtggtgaagccagcagactttacctatcaggccttgctacgataaacaaaccccaattacaaaccatccgtaccccacagtgggaggtcctgggaagcataaacaaactttacctacaccctcctgtaagttccttcatctagctgctaccataaacgtcataaggtgatatatggcaaagttaaccaacaaacgaccccagggtctctatcccccatataaacccctcattttgcaagctcagggctgcctcctctgtctgtaatggagcagccggcaggttaatcaaggcttgactgaacttgggtctctctggcttgtcctttctctcagctgaccctacattcaggtgtatagtcgtcaatagagaaaaatgacgagacaaatctcattttaggaaatttatttgccaaagttaagggcacacgcctgtgacacagcctcaggaagtcctgatgacatgtgcccaaggtggtcagggcacagcttggttttatacattttagggagacgtaagacattaatcaatatgtgtaagaagtacactggttccatccagaaaggcaaaggcttctgtaaaaagtaaaagtagaggttcctcttcaaagactttcctccccatgtaactaggaataaatagtaacttctcttagaagcaaaatttattcaaagacctatgctcctaaatatttgccctggcatgcttatactggtccaagcaagcattaggtcatagcctgttcctcttccttatttaaaagttttttttacctttctcagcattccacaagttacttcctccttcctttgttctcctctgcctttgcctctttaaaaaagttctaaggtgctagccagtcgggacaaatacagaatgtgaggtcctgttccagccaatggaaaccagacacaacagtagggtggatgcgtcaggttataaatgaccctgtctcctttgttcggtgtactctcatggcaaaactgctggtgagtgtaccttttctacaggaagtaaaaatggccttactaaataaattaaattatgtccaagtgctatttctttatggcaccgggagcaagcatttaaaagacttccatgtcacaggtaggtgagagacaaatggttgcattattttgagtttctgataagcctttccaaaggagacaatcagatatgcatctatctcagtgagcagaggggtgactttgaatacaatgaaaggtaggtttgcactgagcagtttccagcttgaattttccttctagtttttagggattttaggggcccaagatattttcctttcacatttccccccttttcgtctttaaaatcttttggagaaagcagtttagaagaaaatggatctctgatcttaggttttatgtgatttcttatggctaggacagtttattcctagatgggcaggtcccaaaagctccttttcagcatgttatgaagtctcatgtcctgtgaagagaaaatagggggaggaagggagaaaaacaacaacaaacaaaagaacaatcctgaaaaattcatataggccacattactctgaagtctatacatcagtaggcaggtatgaaagtggcttatgtatgtaaatatgttgctgttactttcttctgaagtttaagttatctggtttcagttcacagggctttaagaaaaaacagcttagttttcagtgattccaaattagaaaaaaaattgaaaaaaagaaggaaaacaatttaaaaacattattttctgtaatgagtataccaaattgttaaaagtatactaaattgttaaaagctgtcaatagtttaaaagaaaagtcttaagactctgaaaaacaaaacaaaggatcagcaaacattttaagcaaaaagtcaaaaagattagttcagtccatacaggtaattcctgttctgcttgatactcatgaacattttagctctctatgagtcctgaaagcttttcctctattctgatgtcacaatctccaaagttatcagaaacctgcattgaagagcacctgttagagttttatagctgattataaaaccatcattttaataggaccaaaataagacaattgttcatgaatgacaaaaaattttaggacagccatagtcaaagacacaattgacaaggaaacttgttacctctatggcacacaataattttaacataacaattatgattatttctgataatgtacactaagttatatcagaattataggagtttcccaaaattttggaatacataccaataacgtatttatacaaatacagcccaaagaaaacccaacaccatttcatatttgacaatgcttcctgtatactttttgtactaaataaaccaaattatgtcattgtttggactttagggaacctaatatcttaaaggattaattaggtcagaaaaagacataatttatcatttgattttggaaagtttgtcaaatatgaaaggtttaagacacttgatatcacaaagtaggatcccaggtcattgtaagtcattcatgctgggcatggtagctcatgcctgtaatcccagcactttgggaggctgaagtgggcagatcacccaaggtcaggagttcaagaccagcctggccaacacggcgaaaccccatctctaccaaaaatacagaaagtagcttggtgtggtggtggacacctgtagtcccagctactcggaggttgaggcaggagaattgcttgaacccataagttggaggttgcggtaagctgagattgcaccactgcactccagcctgggcaacagagcaagactccatttcaataaaaataaaataagtcattcacttaaccaaagtgataacaaggatttcaggaaaaaggtgaaaacctttattctttgagagaggagacttaattttccaaacaataatccctaataaaaacagcatgaatctaattaaatttgttgttcaaaattttataaacaatctataaaattttaatcttgatcataagatatagcttcgtatgccttttataccctttataacctttattaaagagccagttaatgcttcaagaaaaccttgttaatctgacacaggggcccaaatgcttgtcttgcatcagtgtacctttgatattaatgattaatttatagataaattgaacttattttatctttcaaaattcgctcttacaatctcatgcacccacctcttccacaatagtctctgggccttgaggagttgaacagctttaattttttactctgtgtctcaggaatgagtttattttgactggcatcttctatgggcctgtagatgaggcttcaattgctgtcaatgtttaagacttagcaggactaggtgtcctttttagacccaggagtcaaagccctgtaattcagtgtcacaagcactttaaaagcacatacaggaagatacgtggatgtaataaacttaatttaaaaaatttttatcccagttttttttcctaagcaaaccaaaacttaataatgacaacttgatcatattaaagtttcaggttttttttaatacatatatcctcttattgagacttaacactgactgttcatgacatgcttggactttgttttgtcctgaatattcctccttcttaaacaaccagtcattttattttaggactaaatttaccataaaaaaattatttctctttaagctttcttatgacaaaaaaaaactatttttataactttatctctgtttttatttcctgattccttttaccctgttgtatacataacatttaaataaattttgaattagacaaaacttgtttaccttttctaaaaaggacacagttttttttagcaaaaatgttttcctacaatatatatttattggaaaatacccaaataatgcagtatctattatttaatttttttgagacagttttgctcttgtcacactggctggagttcaatggtgctatctcagctcactgcaacctctgcctcctgggttcaagcgattctcctgcctcagcctcctgactagctgggactacaggtgcacaccatcacacccagctaatttttggggttttggggatttttttttttttgagatggagtcttgctctgttgcccaggctggagtgcaatggcatgatgtgagttcactgcaaacttcacctcctgggttcaaacgattctactgtctcagccacccaagtagctgggattacaggcacccaccaccacacccagctaattttttgtattttagtagagacggggtttcaccctgttgcccaggcttgtctggaactgaactcaggcagtccacccacctcagcttcccaaagtgctaggactacagacgtgagccactgtggtgccctgcctcagttatttctttatagcaatgcaagaaaggacaaatataggatggacttgagaacagtagaccttattacctcatgtggttgctatgaggacaaaatgggttaatatttttaaaacactaaaggcaagtcctggcacacaagtttctatacctgcttactaagtaaccattttcctgctctgccatcctttgtgaagtaccttatgggccaaaatggtgctgaagcaccagccattatgactgcatgacaggaaggaggataaggcacaatatttcccctcacacttggaaaaacaattttctaaaattaggattccatcaccaaggagaaacattcattttactacacactgctgtgaatttatctcactaaataatgctattgtctttgtccattttctgttgcttataacagaattcctgaggccgggtcatttgtaaagaaagggaatttatttcttccattatggaggctgagaaatctaaggttaaggcaccacatctgatgagggccttcctgctggtggggactctctgcagcacagggtatcacgtgaggggctgagtgtgctagcccaggtgtctctttctcctcttataaagccattaatgccaccaccatgataacctgttactcatttacccattaacccattaatggactaatgcattcatgagagcagagccgtcagaacacaaccacttttttttttttttttttttttttttttttttgagacggagtcttgctctgttgcccaggctggagtgcagtggcacaatctcagctcactacaacctcctcctcctgggttcaagcaattctcctgcctcagcctcctgagtagctgggattacaggcacctgccaccacgcccagctaatttttgtatttttagtagagatggggtttcaccacattggccaggctggtctcaaactcctgacctcaggtgatccactggccttggcctccaaaagtgctgggattgcaggtgtgagacactgcccctggccccaatcacttcttaaacttaatctctacattggggatcaatttctaaatgggtttgggaaaggacaagcattcaaacatagcaggttcttttcctcaacaataaattcccatcttcattttattgggatctcactgtctgagctctttattctcttttccccaggaagattgtgcttgagaaacaatcatcaagtctgttggtccacatctcccgcgcactccctggatacccccaacaggccaatccatcaagccacagctcagtttccagggctttaagagaagcagaagaaacgcttccacagtcctcattgtgtgcagggaatgagcatgagttatgggggctcctcaatgctgagcctagccaccccactgctgcatccccacagcccttccagagggtctctatccctccttatctaagagcaaatccgggctccatgtcactgagtgcttactcatccccaggaagaggcagttgttgcactacggggtttttttctgtaataaatgtcctttattttatcagagcatggcactgaaagaaaagaaatcaaatgtataacttgcaaaccagtggagtgaggaaaagaggaggaggtgcgtaaaacacaaccaacccaaaagaagggggttgatgccagttaaaaagtggatgcagtaaaaagaaaatacgaaataagttgggaaaactgagtcaaaatatactagaattctatttcatataaataatgtagtcagttaaaagacagacttcttaaagtaaaagaaaaaaatccagccatctgctgtttacaagagacatacctaaaatataatgaaaaaaggaggactaagaaaagagttggggaaaatataccaagaaaatacgaaatcaaaagaaagctgttgtcacaattttgatatcacacaaaagtgactttgagacaaatagctttattagggataaagagggtcctggcttagtagtaaaaggaagaatttttgaggaaaggcaaactttgaacctatgagccaccaagtaaatgttttcaaatatgtaaaacctaaattcaaaaagttaatatattttcaacttcttccattcctcttccttctccttcctcactctctccttctctcccttccttaataatttagtttaaaatctattagactgagcaaggtgatggtgggccccctggtggcatgaagcgcagcagcaggaggaggggcagcatcacaggcctggagtaggtgtcagagtccaggtggtggaggggccaggatggcagaccagcgtaggatggtagggtggcagggcccagctgggcactatggaccaagttgtatccctcaacattcaaatattgaatccctatgtgactacatttggagatggggcttttaggaggtaaataaggaaggttccatgaggtcataagggtgggaccctcatctgataggactggtacccctctaggagagaagaagaaagtctatgtgagaacacagcatgaaggtagctgtccacaagccaggaaaggagcccttactgggaacccgaccaggccagcaccttgatctcagacttcttgcctccagaagccccaatgcaatgaggaggtatccacgggacctggccccagaattgtcctggtgcagagttccagatcccaaaagggatgaggagagtttacttatggggacagcagtggcccacagagtgccaggacccgagaagagtggtcaggacatccatgttaggaggtgggtcatccactggaaattggtcagacactggggattgatacaatagtaaatacactgatgataatgggaaccaggtttctcactgttggaaaagggagtcacaaatctggaaagggagaaaatgagaatgcgctccatggggttgggtcggaggaactggtgtgcactcatggtcttcaatataagtacagaaatagatccgcatagaaatgtgtgtattaatatgcttgtttccttgctctgtccactgagaaggccttagacctcaacagtaatgaatacacctagagctcagatcttggtttctaaataccattctccaatatataaaatcagggctccctggagaaatggctgattgtagagcttgggcaggaaaggtacaaaataagcctgaaatctttttttatagaaacaaggcagtgctcaaagaatgatgggacatgtcaaaaaacaacacaggggaaaagaggtggagcaagatggccaaatggaatcctccaccaattgtcctcccaaatttaacaatgatctacacaaaaaagcacctgcataagaactaaaaatcaggctgggcacggtggctcatgcctataatcccagcactttgggaagctgaggtgggtggatcacctgacatcaggaattcaacaccaacctggccaacatggcaaaaccccatctctactaaaaatacaaaaactagccggacgtggtggcaggcgcctgtaatcccagctatttgggaggctgaggcaggagaatcatttgaacccagaaagtagaggttacagagagccaagatcaagccacagcactctggcctgggtgatagtgtgggactccatctcaagaaaaaaaaataataataataataataaaaaaatgaggtgagcaatcacagttttaacttcgtattactgaaagaggcaccacagagggtaggaaaggcactctttaattgctgacaccatccctctgctgcccgctggcagctgtcgcatggcacagagcaatcatctgtgtgcttgtgggagggaaggtgcagtgattgtgggactttgcattgaactcagtgctgctgctttgtcacaacagaaagcaaaactgggctgaactcagccagcgcccacccatggagggagcacttagactagccctagccagagagaaattgcccatcccagtgactggaacttcagtttgggcaagctttgccaccacaggctaaagttctctgggggcctaaataaactttaaaggcagtctaggccacaaggactgcaaccccttggcaagacctagtgctgtgctaagctcagatccagtggacttgggggacatgtgacctagttagacaccagcttgggtggctaagggagtgcttgcaccatccctcctccaaccccaggcagcacagctcacggcaatgaaagcaactccttccttctgcttgaggagacaagagggaaaaataaagaggactttgtcttgcgtcttgcataccagctcggccacagtaggacagggcactgggcagagttgtgaggcccctattccaagccctagatcctggatgatacttccagacacacctgggccagacagaaacctactgccttgaagggaaggactcagtcttggcaggattcatcacctactgacaaaagggcccttggaccctgaataactagtaacgataccaggtagtacaccacgggccttgagtgagactgagatgtgctggtttcagtttctatctcggccacaatggggtagagcaccaagtgggctcttggggtccctgacacaaggccttgtcttttgggttccctgagcaaggcaattctggacctgccttgggcaagggggtgcccattgccctgaagggagggtcccaggcctggcagcatttaccacaagctgactgaagagcccctgggctctaagtgaacactgatggtaatcaggtaatactctccatgggcttgtaacggtagtagccatgggagaggctcctctgcttacggaagtgggaggaaagagtgggaagaaatttgtcttgtggtttgagtgcccacttaactgtaatagaatagaacaccagctagatttctaaggttttttgagtccagtttctggcttccagatggcatccctggacccacttggggcctgggggaactcactgccctgaaaggaagaatataagcctggccggcttcaccacctgctgattgtagagccctatggccttgagtaaacataggcagtagcaaggtagtaattacggcaggccttgggtgagattcagtgttgtgctggttacaggtctgacccagcacagtcccagtggtggtagccacgagggtgcttgtgtcaccctaccctcagctccaggcagctcagcacagacagacagactccatttgtttgggagaaagtaaaggaagagaacaaaatctctgcctggtaagccagagaattcttctggatcttatccaagaccacgaaggcaatacctctatgagtctgcaacaaccacactgttacagggcttcaggtgccccccaccccgcccagtgcagatacagcttagatcaaaacacctaagtcccttcaaatacctagaaagcctccccaagaaggatgggtacaaataaacccagactgtaaagactaaaataaatacctaactcttcaatgcccagacatcaatgaacatccacaagcatcacaaccattcaggacaacatgacctcatcaaatgaactaaataaggcagcagggaccaatcctggagaaacagagatacgagatctttcagacagagaattcaaaagagctattttgaggaaattcacagaaattcaagataacacagagacagaattcagaattctatcagataaatttaacaaatagattgaaataattcaagagagtcaagcagaaattctgaaattgatacatgcaattgacataatgaagaacatattagagtctcttaatagcagaattgatcaaacagaagaaaacatcagtgagcttgaagataggctatttgaaaacacacagtcaggggagatgaaaaaagaataaaaataatgaaacatgctgacaagacctaaaaaatagcctctaaggggcaaatctaagagttattgccttaaagaggaggtagaaaaagagataggggtagaagcttattcaaagagataataatgagaactttctaaacctagacaaagacattaatattcaagtacaagaaagttacagaacaccaagcagatttaacccaaagacgagcacctcaaggcatttaataatcaaactcccataggacaaagaaaggatcctagaagtagcaagagaaaagaaacaaataacttacaatagagctacaatatgactggcagcagacttctcagtggaaaccttacaggccaggagagagtggcatgatgtatttaaagggctgaagaagaaaaaaaaaaaaaaaacttttaccctagaatagtacatctggtgagaaaatatccttaaataaagactttcccagacaaacaaaagctgagggatttcacattcttttaaatgctgtataataacccataaaatgaatgtaccatatttaacacgtaatgtttaacacattattaaatgcctaggggcattattcaataatgaagcatgcctataaaaactagaaaatagcctcaaaggggtgaatctaagaggaggtagacaaagaaacaggggtagaagtttattcaaaaagataacaacaaagaactttccaaacctagagaaagagatcaatattcaagtacaagaaggttatagaacactcctcaccagacttgtcctacaagaaacgctaagaaagtttcttcaatcagaaagaaaaggacattaatgagaagtaagaaaacttctgaaggtatgaaagtcactggtaatagtaagtacatagaaaaacacagaatattataacactgtaattatggtgtgtaaactacttttaagtagaaagactaaaagacgaaccaataaaaaataataactacaacaactttttaagacatagacagtacaataaggtatagatagaatcaacaaaaggttgaaaagcagagggatgaagttaaagtatggggttttcattagttttctttttgcttacttatgtaatcaatgttaagttgtcatcagtttaagataacgcattataagacagtatttgcaagcctcatgttaacctcaaatcaaaaaaatgcaatgaataagaaataataaaaagcaagaaatgaaatcataccaccacagaaaatcaccttcactgaaaagaagacaggaaggaaagaaggaagaccacaaaacaaccagaaaacaaattacaaaactgcaggagtaagtccttacttatcagtaatactaaactctccagaaaagacatagagtggctgaaaggatttaaaaataaacaaacaaaaaccaaaaaaagacccagttatctgttgcctacaagaaacacacttcatctataaagacacacacagagtgaaaataaacagatggaaaaagatattctatgaatatggaaaccaaaagacagcaggatagctacagttctgtaagacaagatagatttcaagagaaaaactaaagaagaggcaaagaaggccattatataaataataaaggagtcaattcagcaagaggatataacaagtgtaaatacatatgcacccaacactggagcacccagatacataaagcaaatataattagagctaaagagagagatagaccccaatacaacaataactggagacttcaacaccccactttcagtattgaacagatctttcagacagaaaatcaacaaaaataatcagacataatctctgctatagaccaaatggacctaatagatatttatagaacatttcatcaaacagttgcagcatatacattcttctcctcagcacatggatagttctcaaggagaaataatatgttaggtcacaaaacaagtcttaaaacattcaaaaaactgaaataatctcaagcatgttcactgcccacaatggactaaaaccagaaatcagtaccaaggggaattctgaaaactatacaaatacatggagattaaacaatatgctagaatcgctcgaacccaggaggtggaggttgcagtgagccaagattgtgccactgcactccagactggatgatagagcaagactccatctcaaaaaaaaaaaaattttaaaaaaaacaaaaacaacatgctcctgagtgactagtgggtcaatgatgaaattaagaagaaaactgaaaattttcttgaaacaagtgataacagaaacacaatatgggataaagcaaagcagtactaatagggaagtttatagccatagggtctacattaaaaaaaaaaaaaagatgccaggtgcagtttaatcccagcctgggaggccaggcgcagcctgtaatcccagcactttgggaggccgaggcgggtggctcacctgaggtcaggagttcaagaccagcctggccaacagtgaaaccccatctctactaaaaatacaaaaaaattagccaggcatgatggtgggagcctgtaatcccagctactctggaggctgaggcaagagaatcgcttgaacccgggaggcagaggttgcagtgggccgagattacaccattgcactccagcccaggcgacagtgcaagactctgggaaaaaaaaaaaaaaaaaaagagagaaagaaagaaagaagaaagagagagagagagaaagagatagaaaaaaaagaaaagagagagaaagaagaagggagggagggagggaggaaggaaggaaggaaggaaggaaggaaggaaggaagttcaattaaacaatgtaacaatgcatcttaaagaaacagaaaggcaagagcaaacccaacccaaaattagtagaagaaaagtcagagaagaaacaaatgaagtgaaatgaagaaaacaatacaaaagatcaataaaataaaaagctggttttttggaaagataaaattgacaaactttagccagactaaaaaaaaaaagaagatacaaataaataaaattatagatgaaaaagggggttattacaaccaatattgcagaaactcaaaggatcattagtggctacagtgagcactatatgacaataaattggaaaatctagaagaaatgaataaattcctagacgtatataacttgccaagattgaagcatgaagaaatccaaaacctgaacagaccaataacaggtaacaagattgaaactctaataaaaagtctcctagcaaagaaaagcccaagaccccatggcctcactgctgaattctaccaaacatttaaaaaactaataccaatcctactcaaattattccaaaaaataaaggaggagagaatacttccaaactcactctacaaagccagtattatcctgatactgaaactagacagacacatcaagataagaaaactacaggtcaatatctctgatgaatattgatgcaaaaatcctcaacacaatactagcaaaccgagttcaacaacacattaaaaagatcattcgttatgaccaaatgggatttatcccaaagatgcaaggatggttcaacatacacaaatcaatcatcactgtgctacattgttatcaacagaatgaaagacaaaaatcataagatcatttcaactgatgctgaaaaatcatttgagaaaattcaatttcacttcatgataaaaactctcaaacaactgggtatagaaagaacacatctcaacataataaaagccatatacaacagacctacagctagtatcatactaaatgaggaaaaagtgaaaacctttcctctaagatctggaacatgacaaggatgcctaatttcaccactgttattcaacatagtactggaagtcctagctaaagcaatcagacaagagaaaggaataaagagcatccaaattggaaaggaagaagtcaaattattcttgtttacagatgatatgatcttatatttggaagaacctaaagacaccaccaaaaaaacattagaactgataaattcagtaaagttgcaggatacaaaatcaacaaacaaaaatcagtagcatttttatatgccaacagtaaacaatctgaaagagaaatcaagaaagtaatccatttacaataaccacaaataaaacacctacaaattaacttaatcaaaaagtaaaatatctctacaatgaaaattgtaaaacattgatgcaagaaattgaagaggacataaaaaaatggaaagaaagtccatgttcgacccagcgtggtgtctcacacctgtaatctcagcagtttgggaggccaaggcaggcagatcgcctgcggccaggagttcaagaccagcctggccaacatggtgaaaccctgtctctactaaaaatgcaaaaattagctgggcatggtggcgggcacctgtcatcccagctactcgggaagctgaggcaggagaatcacttgaacccaggagacagaggttgcagtaagccgagattgcaccactgcactccaggctgggtgacagagcaaggctctgtctcaaaaaagaaaggaaattccatgttcatggattgaaagaatcaatattgttaaaatgtccatacttactcaaagcaatctatagattcaatgcaatccctatcaaaataccaatgacattattcacagaaatataaaaaaaatcctaaaatttatatcaaaccagcaaagactcagaatagccaaagctatcctgagcaaaaagaacaaaactagaggaatcagattatctgacttcaaattatactacagagctatagtaaccaaggtgctaagattacaggtgtgagccaccacacttggacttggctcctgtgagtgtttttgtttcttttttttaatttttaattcttgtgggtacatagtaggtatatatatttatggggtacatgagatattttggtacaggcatccaatgcataataatctcatcatggaatattggatttctagctcctcaagcatttatctgttgtgttacaaacaatccaattatactcttttagttattttgaaatgtataattaggctgagcaccgtggctcatgcctgtaatcccagaactttgggaggctgaggggggtggatcacctgaggttgggagttcgagaccagcctgaccaacatggagaaaccccgtctctgctaaaaatacaaaattagctgggcgtggtggtgtgtgcctgtaatcccagctactcaggaggctgaggcagaagaatcgcttgaacccaggaggcggaggttgcagtgagctaagatcatgccgttgcactccagtctgggcaacaagagcaaaactccgtctcaaaataattatatagatagatagatagatagattacaattaaattattattgactatagtcaccctgttgtgctatcaaatactaggtcttattcattttgtccatttttttcccccattaaccatccccacctcccctaccctcccactacccttcccagcctctggtaaccatccttctaccttctatgtccgtgaattcaattattttgatttttagatcccacaaataagtgagcacatgtgatgtttgtgttctgtgcctgatttattttctttaacataatgacctctagttccatctatattgttgcaaatgacagggtctcattctttttaatggctgaatagtactccactgtgtatatgtaccacattttctttatccattcctctgttgatagatactttggttgcttccaaatcttggctagtgtgaatagtgctgcaacggacatgggagagcagctaacacttggatagactgatttcccttctttgggtcatatacccagcagtttgattgctggtagttctattttcagttttttgaggaacctccaaactgttctccatagtggttatagtaatttacattcccaccaccagtctatgagggttcccttttctccacctcctcgccagcatttgttattgcctgacttttggataaaagctattttaactggagtgagatgatatctcattgtagttttgatttgcatttctctgatgatcaaggatgctgagcacctttttgcatgcctgtttgccatttgcaagccttcctttgagaaatgtctattcaaatcttttgcccatttttaaatcagattattagattgtttcctatagagttatttgagctccttatatattccggttattaatccctgtcagatggttagtttgcaaatcttttctctcattccgtgggatttcttttcatttttgattgtttcctttgcagtggagtagctttttaacttgatgtgatcccatttgtccatttttgctttggttgtctgttcttgtagggtattactcaagaaatttttgccctgaccaatgttctggagtttccccaatgttttcttttctttttctttgagacggagtctcgctctgtcacccaggacggagtgcagtggtgtgaccttggctcactgcatcctccacctcctgggctcaagggattctcgtgcctcagcctcccgagtagctgggattacaggcatgtgccaccatgcctggcaattttgtgtgtgtgtgtgtgtgtgtgtttttagtagagatggggttttaccatgttggccaggctggtctcgaattcctgacctcaagtgatccacctgcctcagcctccgttaagtgctgggattacaggagtgagccactgcccctagcccccagtgttttcttgtagtagtttcatagtgtgaggttttagatttgtctttttttaaaaaaaattatttcatttttttgagacagggtctggctctgttacccaggctggagtgccgtggcacaatcatggctcactgcaacctccatctcccaggctcaggccattctcccacctcagccttccaagtagctgggactacaggcacatgacaccatgcctggctaatttttgtattttttgtagagaaggggtttcaccatgttgcctggccagatttaagtctttaatccattttgatttgatgtttgtatatggtgagagagataagggtctactttcattcttctgaatatgaatatccaattttcccagccccatttgttgaagagattatcctttctccaacgtatgttcttggcacctttgtcaaaagggagttcattacagatgtatagatttgtttctgggttctctgttctgttccattggtctatgtgtctgtttttatgccagtaccttactgttttggttactatagctctgtagtataatttgaagtcagataatctgattcctttagtgcagatgccatgttaatctgatggtcaaggttaacatcaccaccaatgggccacattaaagctgtgtgccctggcaggatgcagtgagagctctgcgtcgctttcaccatcttcctgcccaagaggcatcacctgagcctcatcgtgggggaatcgtcagcccaacccgcagtgaggggcgggggctccacaagacacctggcctgtgatcatccaagggcaaagtcctgaaagtcaaggaaagatggaaaagctgttccaaggaacagctcggaccactaaatgcaacagaccactaaatgcaaacactaaatgcagagacatgaccactaaatgcaacaagggatcctggaagggactcttgtgctgtaaaggacgtcgctggggccattgaggaaactcgaacaggacctgtggatcagataatcatgatacatcagtgctgatttcccgatttctatgtctagatgtggttacgtaggaaaacatccctgttcgtaggtagttcacactaacatatttggtggtgggttatcatggtgacaactcaattggttgagaaaaaaaacaaaccctttgtgatattcttacaatgagtgaatgagtgagtgaatgctaacccctcaccacagtacaggaaggttacaacaaatgcagtcataaagactggcttcagccaccctctgcagccaaacccatgtgatgggcctacaagtcatccaaagtgtgctcattcattcattcgatgtacattcattcattccttccacatatattaagcacctcttgtgtggacgggaccgcacaaggttcagggagccaaggacaaagaaagccgtgtcttctctcaaggagacaacagtctagtccattgtaaggtttgactttgtgttttttggtttttttttttttttgagacagagtctcgctctgtcgcccaggctgaagtgcggtgatgcgatcttggctcatggcaacctctgcctcctgggttccagcaattctcctgtctcagcctcccaagtagctgggactacaggcacctgccaccacgtctggctaatttttatattttttagtagaggcagcgtttctccttgttggttaggctggtcttgaactcctgacctcaggtgatctacctgcctcggtctcccaaagggctgggattacaggcatgagccaccgcgcccagccagtttgttttgttttgtttttttgacacagagtctcactcggtcatccaggcaacagtgcagtggtgcgatctcagctcactgcaacctccccctcccgggttcaagcgattctcccacctccgcctcctgagtacctgggattacaagcacccgttaccccacctggctaatttctgtatttttagtagagacgaggtttcaccaccttggccaggttggtcttgaactcctcacctcaggtgatccacccatctcggcctcctaaagtgctggtattacaggtatcagccaccgcacccagagtggggggttgactttggaggaatgccagttccacccctggctccagcaccttcctgtgtgtgaccacaggcagtcatggagcgccaggcgcctcactcatgaagtgtgacagtgatagcaacttccctaggtggcagtgaaacttcagtgtagcggccgtgaaaacatttcccacggtggccggtgggtacttggtccttggaaaatatttttcttctcatttccgtggaaatagccttcagagttctcagaatcgctttccccaaaacctgaaaatcttaaaggggaaaccattttcagaataaaaagagccacctctcatgactgacactgccccctgctgtggtcccgatgagaaccagggcactagtgggtaaggtatgagctgtgcctgccagagagacaagcccagtgtttccaacgtgaagtaatacttagaaactaaacaggagttccaaaaattttaaacttggtttttttttttttttttttggagatggagtttcactcgttgcccaggctggagtgcaatggcatgatccccactcaccgcaacctccgcctcccaggttcaggcgattctcctgcctcagcctcccaagtagctgggattacaggcatgcgccaccatgcctggctaatttttgtatttttagtagactggggggtttcaccatgttggccaggctggactcgaactcctgacctcaggtgatccacccacctcggcctcccaaagtgctgggagtacatgcgtgagccactgcacccggccctcctgcttccttttaatgctgtgtatattcctttggatgaatgtgctggaatttgatttttggacaaatcaaattggacatttggtttgtttccagtctggagctgttgagaatggaactgctgtgaacatttttgtgcgaatcttttcagggacattgctttcatccgtcttgggtaaatgtctaggagtaggattgcctggccatcagtgcatttatgacttgttaaaaactgctgattttgtctttttctttttttttgagacaacagtcttgttctcttgcccaggctgcagtgcagtggcacaatcatggctcactatagcctccaactcaggtgttcctcccacctcagcctcccaaagtgatggggttacatgtgtgagccactgtgcctggcccaaaacttctggttttctgaagtggttgtgccacatccttgctaacttgttgtttcctttgtgcatttttttttttttttttttgagactgtgtcttgctttattgcctaggctggcatggctcactgcaacctctgcctgctgggttcgagcggttctcctgtctcagcctcccaaatatctgggattacaggcgcccgccaccacgcccagctaattattgtatttttttttagtagagacagggttttaccatgttggtcaggctagtcttgaactcctgacctcaagcaatccacctgccttagcctcccaaattttgggattccaggtgtaagccaccgggcccggcctgcaattcttctaagctgctttcccccctccccccgaacccagcttcaagtgattctcctgcctcagcctcctgagtagttgggattacaggaatgtgccaccatgcccggccaaattttgtatttttagtagagatgggggtttcaccatactggccaggctggtcttgaacccgacctcaagtgatccacccactttggcctcccaaagtgctgggattacaggcgtgagccaccgtgtccggccctaggctgcttttagccatcaacgtgtattgagggcaaggacatctagagtcgagtgaatagtggcgaggcaccacggaaacgcagccaccagactgcatcagagggacctgtccttgccctgccttcctctgactgtctggtcaatgtacagggtggggagtgggccaaggttgggtgcatcgttttattttagttcaattgcacagcagtctgaaacagagcagaatgcttcttcctggactgcgtgtcattctgtgtctgctttgaagtttgccatgccttttccccacactcacacgtgctgtctgccagccccctccatcatctgccagccccctccaaccgcaggactactcagtatctgtgggatgcctctgccaccctcactggagctgtggccacgagatgtgctctggatgcctcagcgggtccctcaggacctgcagggacagtatccagcacagcatcaggacaaagtgctcttggcttctagttctagaacaagcggctcgtgccaatcaaccctgcttccagctcttcctgtctttattttttgacctgaaaatgtgcatttacctgttactggggagactggctagccaggcagggagagcgaatcctaagtgcacacacattcctccgtgtgaacagaccacagcttgcttttcattgtcctggccacatcaggaaacagcacccgcagcggctttgcagacccctcccctcaagtgttcttgtattcaacccccacaccctgcaagaagtaaggatgaccctgacttctgacacctgacgttggctttgcctgtttctgaatttggttgcagaatcactcagcatgttctaagggcagagagtcactggtgtcgctgtgagtatacattgccttatcgagggtgctgcctccccgtgtcaggctgtggtgctgctgggaattgcttgcatgtgccacacctgacacaagttagccaggcgtggtggcacgcgcctgtaatcccagctactcaggaggctagggcaggagaatcactgaaacctgggaggcaaaggtttcagtgagccgagatgtcgccactgcactccagcttggagacagagcgaaactccgtctcaaaaaaaaaaaaaagagagagaaagaaaaagaaaacctggcagatacctccttacccttgtgctcaaggtcaacattgccagtcatgagacacttggacatgtggacccctggtgtggtaccctgggaaggacacagcgccactgcatgcacttcccgccaaaatgtgtagcctgtgaaatgatgtccggccaaacatggagacacattccgcagcactcacccctcagaggtgtcatggccactgaggccaggacgaactgagggacagtcacagcgtggaggggactaaggcgacagcaaagggcagcctgggaggctggcttgggtcctgggacaggaagatgatggcgtggggacttttaaagtacggagtcacttggcctggctgtgtttgtgcatgaaccagcagagggggagaaagtggtcaggtcatagcgggagggccacaggggacatccaggggcaagtgagaccgggaaggactcctgcctgattttcctgccttcctgaatttctgtgtttgcaggggcggggaggggggatgtaatttacatacagcaaaacagagagatctcaaaagatgctgttgggtgagtactgtcaaacgtgtacaccatgtaaccgtcaccccagtcaagacgtggagtgtttccatcacccctcaggctttgccctgtgccccacaatcatacttcccagtgctgcgcttagaccgggtaggcaggacgccgtgcctcagggctcgggctgaccgaggaggaagcaaatacttcagcagccctactcaggggccgcgctctagtatttctttgggattttccaagtctgtctttggtgcttgggaatggttggtccccatctttcccatgcagggcactctctgatcctctataccctacctcctagggtcaaccagtccatgcctgtcttggccttcagcagtgcgtgtgtatgtgtgtgtgcgtgcgtgcatgtgtgcacacataccctttggtgttctgctgttccacttttctggttaagcacccaaggtggtggggtaggggcgggggtccttcaccctgtgcactccaggacacacccccatcccctctgtaggctccactccacaccacctgcccacctccacacctatgaccttgtcccctctcgcctctgatcaggatggtgatgttgtggcgaggtcgtgctctcccaggtccatcttcaggcctgtagacagaaagacggaccttcctcgcacaagtggacctctcttctcgcttgacccagagccctgctggaggcggccagggaggcaggggtgtgggcgacactgggaatgcagccatcgtagctgaggagtccaagtgggcccatgactggaagtctcctgcttctactaagaattttttttttcaagacaggagttttgctcttgtcgcccaggctggagtgcagtggcccacctcgacctcccaaagtgctgggattacagacatgagccacctggccgtatccagttatctgttgatatcagtatggatttggggacatttattttatgctgttataaaccaatgctatggccattgactcattccaggtttggcccctgggatctccctcaggctggcccctgggttctttcaacaattccccatctttttcaaacacatcctcatttcctgggtctacaaagtactccaggcttagctaggatttcgtctgccccagtcctggaacaaaccagttctccaaggattgccagtttcatacgctggagaatagtgctagaaaacgaagatctgagtgcaaggtgagctcactgtggctgggatatcatcgtttctagaccctttgagcttaaagacctagaaaagacatgcatacttaatagcccaagcataggcaggcttctgcatttattcctgtatctacctgcatatatacatggtaaaaaccatgggtttacacagataccttggagccaacccaacaccaagggctttccttggcctccctctggctctcactgtccgatgcagattagatttacctgtgtggtcaatcctcgtgtgtacatacatttcagaactgctggcctggacccatgtgaaaaacagtcaccatctacagcaggggtgtccaagcttttggcttccctgggccacactgaacaactgtattgcaccacacataaaatacactaacattaatgatgactgatgagttaaaaaaaaaaaaatcgcaaaaaaatctcataatgtcttacgaaagtttacaaatttgtgttgggccgcattcaaagctgtcctgggccgcacagcccagaagccgcgagttggacaagcttgatctccagtattctgtccagttctttttgtctttaaacttacttacggtatccatcaaaatcctattttccaaagttactttttttttctttttagatagagtctcgctctgtggcccaggcttgaatgtgatctcagctcactgcaacctccacatcctgggcctcctgcctcagcctccccagtagctgggactacaggcgtgtgcaccaccatgcccaactaatttttgtatttttagtagagacagggtttcaccgtgatggccaggctggtcttgaactccttacctcaggtgatcctgcctcagcctcccaaagtgctggaattacaggcgtaagccactgttcctggcccacagttactcgtttctttccttcaccctggattcaggatggtaaagttattccttttgaacagtgaagtttgcttgttactgtttatatccatttggaatttctcccacaatctggttgatcttcattattttggggggctatgaaacatcactgtgattctaagaatggggcgcttcacagaaagtctccttagaaaaatgttgctccgccccatccctgctactccattcccgttcccttctttctgccccactcccatccgcccctgcaggcaacaactctctttaggtcctggtttatctttccttcctccagagcacccgagtaactgcttctctccccatctcccttacctgaagagcacacgctgcagatacacatctgcacctgcttcgtgctcagcagcgggtcgtgggaaccaccctacattgtcactcatctgtcacggctgcacagtgctcccttgtgacacaatgcacagcctataaccttttgggtgtttgcatattgttggacgtgcatcttcagggcagactccaccaagcgctgcttctgggtgtgggtcagacgtgggacctgggaaaggatccaaagggccctgtggtccggtccagaccagggtgaggcatggaggaggctctgcacagccatttgcagctcagccagcaccgggtgatggcagggaggcctgggcttctgcactggcttctggcctcttctgggcacccacgctttgtccatgaatggaaagcaatgctgacggctgcccaatgtgtccaggacgtttctgaaactcctgttcctctccccgtccctctctctgtcccactgtccacctcagtgacctcctctcttcgtggctctcaccccacactctgccactgccacattttcctctgcgcccagcctctgcctccacctgaaactttcctggaaatctcaaaatgtaattccaggtcccgctgccctgggcagcacatcccccttcagaataaagggcaccaaccgtcccctggcacctgcctaagccataccccttgctcccctccccagtccctgcagcccaagggtcccctcgaccaccccaagtccccacctgggcttctgctgcacccccgctgccctccctcccgctggccggcagcaccttctccacccgggcccctctgctcacagcgctccccgcccccgtctccccgaggggcggggagccaggacatggccctgaaagcctagccctggccttgacctccccagagcgccctccccaccctccgccctctgccaaccctggcccctgccctggccccgtccttgtcctctgctgctggccttggggtcgcgccccgcagactgggctgtgcgtgggggtcctggcggcctgtgccgtcccacgcctacggggatgggcgaggtccttcttggggcttctcttacccactctccagtcacctgagggcgctgcttccctgcggccaccccaggtttctgtgcagccgaagcctctgcctctgcggccgggtgatcccaagaccccggggtccagggaggcacgggatctgctcccccggtcccaaatgcaccggctgcgccttaggagggacggcctccacccatggcgctggcgcccaggggccgctcctcggactacagcacttgctcgtcgccctgcgccctgtttagttctcatcaccagcagcctggactagggccctggtccttctggcctccttccacagcccgctgcacatctcacccacttccccgaggtgctgtcattgtttagctgggcccctcagcctccgtggtttagaatcgtcagaaagcccggttcatcaggtcactattgattctggtttgcataatcctttctaaactgtgtgactgttccctgtcaaatttgtttttgaaatggagtccctctctgtcacccaggctggagtgaaatggcacgatcttggctcactgcagcctccacctcccaagttcaagtgatcctcctgcctcagcctctcaagtagctgggactacacacaccaccaggaccagctgatttttgtatttttagtagagatggggtttcacctgttggccaggctggtctcaaactcctgacctcaggtgatccacccgcctcacccgcctcagcctcccagactgctgggattacaggtgtgagccaccacgccctaccaagcagtggtttttaaaggcaaaatgaaggccgggcacggtggctcacgcctgtaatcccaacactttgggaggccgaggcaggcggatcacttgaggtcaggagttcaagaccagcttgtccaacacggttaaaccccgtctctactaaaaactcaaaaaaatagccgggcgtggtggacacctgtaattctagctattcaggaggctgaggcaggagaatctcgaacctgagaggctgaggttgcagtgagccaagattgcaccactgcactccagcctgggcaacaagagtgaaactctgtctcaaaaaacaactttgggaggcagagataggataacttgagcccaagagttggaggccagcctgagcaacatagcaacatctcatcctacaggttttctttcctgttcccatctctttatcctccttggctgcttcctccactccattctcctgctcaggaatttgctctccagggtttttcattccgctccttagcagaaggtgttcctgttgctttccaaggtcagttttcactcccaaggcctctgtgttcttctccctaatggtgccctcccccaaatctgatggaagcaagcccctgcctgctttggaggtccccaacccccaaacgtggtgggtgggtcgcttggtgctgccactgactcctgcccccaagagctgcctctcatttcaagctgatgcacttctcgctgtgacctcacaggaggaatggcgtgtcccacctgtcttgagaggttgctgtctgacatcagtgcaggtgtagagaggagggggcaggggtgaagggccatcgtggtgcaaaccccacttcctccaaggaggagctgagcagaacaggaagcgtcgggccttcagctcccacgcctccggctgaggcttccatacgtgacccagggcagactggtagtgaagtccccatgctcagccaggagcaccgctgaggcctccagtgcaccgaggggtgatgtgcagaggccccgctgcatccacggtggttttttggtgggcagcacttgcatgccccgacctggagtggccccagcccaggggtgtctggcaggaaggggtctcgggaccatctgctccagggtctcctttgagaccagtaaggggaagtgcctgccatccgtgagtagagcctcacagagtgctgggagcgcctgtgggtgaggatggggctggcctgggaggacgaggggcttcgaagccacgggaaggaggctggggccacaagcccccaggggggtggatgggaggggctgggcaggaggagggttcccgggccgcctcaagcccccaggggggcagatgggaggggctgggcaggaggagggttcccgggccgcctcaagcccccagggggccgcccctgtgtacctgctgtgcctgcctgagttaggccctcctgtctgcacgccacccctgctggctgcagtgactccatctccagaccgtgtgtgtgtatgtgtatgagtgtgcgtggtgtgtctgtgtatggtgtctatgcatgtatgatgtgtgtaaatagtatgatgtatttgtgtatgcgtatctatgtggtgtgtgtgtatggtgtctatatagtgtagtgtgtgtgcatgtatgatgtgagtggtacagtgtgtgcacagctgtatgtggtgtctgtgatgctgtgtgaatgtgtgcatgtgtggggtatgtatgtacatgtatggtgtaagtgggatggtatgtatctgtatgtggtggtgtgcgtgtgtttgtggtatggtgtgtctgtgtgcatgtgtacatgtatagtgtgagtgggatggtatggtatttgtgcgtatgcatgtatggtttgtgtgtgtggcatagtacgtggtataatgtgtgtgtggtatatgtgtgcacctgtatctgtatggtgtctgcgcatgagtggacatgtgtgcgtatgtggtgtggtgtgtgtagtgtaatgtgtggtgtgtatgtgcgcaatgcacatattgtgcgagtgtgtatgtgatgtttggtgtgcatgtgtggtgtgagtgtatgtgcacatatggtgcataagtgcctgtgtggggtggtgtactgtgatgtgtgatgtatgaatctatgtatgtgcatatatatggtgcgagtgtgtgcatacgtgattggttgtgtgtgggtgcctctatggtgtgtgcatgttctgtgtggtgtgtgcctgtgtgtatgtggatatgtgcatgtatggtgtgagtttagtgtggtgtggcacatgtgtgtatgtggatgtgtggtatgtgagtgcatgatgtacctgtgtatgtacatgtatggtgcggagtgcgcacgtgtgatgtggtgtggtacatgcgtaagtacatgtgtggtgtggtgggtgtgtgtgcatggtgtggaatgtgcacgtgtgtgatgtgtggcacatgcatatgtacgtgtatggtgcacgtgtgtgtagtgtggtatagcgtagcatggtgcatgctccacgctcctctgggaccctcaagcttccctgcctcctctgtggggacccctgggtgacgtcttgctgtagaggagagggcgctgctgtgcaattctggtccagatggttcagctggtgaccctggcctccccatgccaggctcctggaggccattcccaaggtcctggggggaggattgaaaccacgcccctgggtcccacacccacctggccccctacccccgaaactgccgccacacccaatcccccctctcccggatctgggagctgggattctgccctgctgtccccgtctggggcccctctcctctgcaggtgcctcagttgggagaaggaggggtggctgtgaaggtgaggatgaaggagatggcccaagagcacagcctgggggcaagttcccagggaggcactcgctggtaagggaacagggaacactcgctgtcacccaccttccttgtgacagtggcgctgtggcccatccaccatcaccccagcgcttcaccatgagcagcttcacgaatccatgcccagctcactgcagaatccccgggcaccagcgcttcgccaagagtggcctccagactccacattttaagaaggaactcccaccccattcagctcgctgcagaatccccagggtccctgccagcctggcacccagcgtgcccctcagtattctggggattagtgggggagtccctctgccgggaagaggtcctggctgtgtccctgcagggcagtggctgagcccatgcctcgaccccagggccagtccccgccaggtgccatcctgagcagggccacagaacagatgtcccacatggccaggacccctgtggccacctgaccccgggggggctgtggccctcggtgaagcaggtgaccgggcgggctgtggggtttgtcagctccgcagcgtcactgccgctcagcgtatgagtttccactcccagcactcaatgaacagctgagcaactgcaggtgcctccgagtgctgggagaggggatgctcagccagccaagggcctttgccccaggggagtaaaatcggggcatttcctggtgggtgtgggctgggctggagaagctgggcctccgggcaggggctggcatactgtccagacactgcacggactgccagacactcctcacctgggcctcgggcttctcacctgaaccacagggtggtaacccctgcccctcaggtggcattgacgtgacctgcctagtgcacagtgagcctgaggcaacacggccaccaccaggagactccctggggaagaggcccccagacagccaggtgcccatgaagttctgcacaggggccgccgccgtccaggagatgggagggccctgtctgcaccctgtctggaaggggagtggggcgagcgggccacttggcctccctggtataggtaaggccaaggcagctagaactggggacagaatacccgcaaaggggaggggagctgcacagatgaaaggaaatacacaccagcgtcccgttggggtcttcggatgaacaccaacctacacattctgtaaaaccccaggacgccaaagagtagcttttgaggaaaaaacaatcctccggagggtaagacaaacaattcccgccttgcacagaaatcaccctcgtccctccagccagtgtgcagacacttctgaatacccaggattctgcagggacagcaggagggtcacacctgggaaggactaaatcatccaaggaaaggctacttcagcctcactctagtgagcttaaaacaaacctgaaaaagaccaaattaatctacatggggcttaacagccggccagaaagcgtaatattctttaaaggaaccttaacaaaacttcacacttaataatgtaaatctcaccatgttcctagtcaaaaatttactacacagactcagtagcggaaaaacatatcccataagcagaggacaaatcacagatgctcctcgacttacgatggagctacatccgaacaagctcatcgtcggccgacagatcgcacgcaagtggtccacggatcgcacataagtggtccacagtcgacagaaacagacctagatatgacagtaataatgaattagcagaaaaggaacaattatcttaaatttgctccatatgctcgagggtattttttaaagcatgattatgattaaaagagaaatggaagacactggtgtgcttttttttttttttttttttttttttgagaccgtcactctgtcacccaggctggaatgcagtagtgcaatcacggcttgctgcagcctcaaactcccaggctcaagtgatcctcccgcctcagcctcccgagcagctgggactacaggcatgtgccaccacacctggctaattttttttttttttaagacagattcttgctctgtcgcccaggctggagtacagtggcgcgatctcggctcactgcaacctccgcctcccaggttcaagcgattctcctgctttagcctctcaaataactgggacaacaggcatgtgcccagctaattttttatatttttagtagagacagggtttcaccatattggccaagctggtctcaaactcctaaccttgtgatccactgtcctcccaaaatgctgggattacaggcgtgagccaccgcacctgacctttttaattatttttaaagatgaggtctcactgtattgcccaggctagtctcaaactcctgggctcaagcaatccccctgcctcaacttcccaaagtgttgggatcacaggtgtgagccgccagcctagctggaagacatttttttaaataccaaaaccaaatttatagagatgaaaaaacacaatggctcatacagaaaatggccatagcttaacagcagcttaaaagatcagtgggcttgaagacgtggaaacagaatctaccaaaaatgaaacgcaaactgaagaagatgagcagactcacggacccatgagtccacagcaagcagcccattcgagtacctgggactgcaggaggcaggggaagagaccgaatagctagaatatttccaaattgcataaaaatgacaaagcctacaaatcttgacaaacccccaaaacacacacacataccctaaagcttatcaaattacagaaaaccagggataaagagaaaaaaacaaaagcagccgcagaatacatacatgatgactatcatgtatcagtcaagagatagaaacatttaacacgaagaatgattcaacaggaacagagggttccactaacatgtaaagagacttccgagaacggaggcgctgaggcctcgggagaacctccaccgccaggactgagacaacaaacccacaagcgttgagtctggatcttggtgagaacctcggaaccccacgtcggctgagacgcagctctgacctgagtggggctatgatgtgccgggtggtgcagttggccaaggtgcagcaggccaaggcctgagagcaggaagcccggggcaggagtgccagcgagactcacccagaagctctccctggggcaggagggaggcagacgccctgggagctggacagaggcaaggaagcttagcaggaatccttcccaccgtggtgaatgaacctgggtgttgctaaactcctgcagactgtcactgagagcccccgcccccaccatgaggctggcaggcacacaccacggaagccaggaaaagcaagcacactggaaccaggagggcaggcccctccctcctgtggagtccctccagctccttccagtgacagagccaaacactgtgccaacctgcaaaggagggtacagggagggcccagcccagggtcacacggcagggctgagaagggtgcactgggcacggagaggcaagacacggatagctggagataccgtgtgggggccacacatatctgcacgtgcacatacaatcaccctcccactatgaagcacaaaacagggctcaacaaatctaaagagagggaagtcagcaaagtatattctgagaccacagtggaattaaaaccagaaaccagaaacaacaacaaaatctggaggaaaaccctaaatgtttggaaattaaaccatacttccaaataacccacagaccaaagatctcacaagggaaatcagaaagtaaaacgtatcacgtcaacatatatggggtacaggaagaaacacagaaagctctccttcccggaggggccctcgcggctggtcagctgctgctggctgctggcaggaggcctcagttctctgccatggtaacctttgtaggctggctgagtgccctcgtgagcttgcggcacatttcccccagggtaagtgatctaagacgggtaagtcaaggttttggtaaggtggcctcagagaacaggatcaaggttaggtctggatcgaaggtgggcagtgtcactggctccctgcaaaactccacaccacacactgtgggccttccaagtcgatcatgagccgccacagccgcaaacactaggcgttgaggatgcactgcgttttccacgctggggtcggggtctgggatgaaggactggcaggatcttctaagaaatgtgcataactgagagccagcaattccacgcgcaagtacacacccaacagaaatgcttacaaatgttccagaagacgggtgctggccgggggcagtggctcacacctgtaatcccagtgctttgggaaactaaggcaggaggactgcttgaggccagaagttcgagaccagcctgggcagcagagcaagacaccatctctacaaaaactacaaaaattagccagcacgcaggcacacacctgcagtcccagctactcaggagactgaggtgggaggatcgcttgagcccaggaggcccagcgagccaaggtcacaccactgcactccagcctgggtaacagagcaagaccctgtctctaaaaataaaaaaaaaacagaagacaggtgccagcatgttcatcactgcactattcctaacagccaaactgtggaaactacccaaatgcccattgataatagaatgaacgtgctgtgggattttcacacaatggagtacttggcatacagagcactgagaatgaacaatccacaaccacaggcaacaaggtggatgagcctcacagagagtggagcagaagcggccacagcaagagggaaactgaggtcaggccggccagcatgcctgtgcagtgcctagaagggaacatgggcgtgggggcttctcagcaggtgctaagtgtcctgcttctcgtgggtagtcacacacgtgcattcagttgctgaaatcccagttccagcatttcacatgcacttctcggatgtacagtacgcacactgtaatcaaaatgaagaaagacgggctgggcataatggctcgtgcctgtaatcccagcactctgggaggccaaggtgggaggactgcttgagcctgggaggttgaggctgctgtgagctgagatcacaccactgcacttcagcctgggtgacagagtgagaccgtctggaagaaagtgcttagaattaaatacaatagattgggtgcagtggctgacacctataatcccagcactttgggagtgcgaggcgagaggatcacctgaggtcaggagttggagaccagcctggcaaacatggcaaaaccccatctctactaaaaatacaaaaattagccaggcgtggtggcaggagcctgtaatccagctactcgggaggctgaggtaggagaatcgcttgaacccgggaggcggaggttgcagtgaggtggaggttgcagtgagccgagattgtgccaccgcactccagcctgggcaacagagcgagactctgtctcaaaaaaaaaaaccagatacaatgaccaaattttcttcatcaattaaagaggtagaacaaagtccaaggaatgtcctaaaagtaaaatacatagaaactaaaaaaataacggaagagagcagattaaattgaaggagtgagatcctcccagatggcaaacagggtggcgacatctcacagaacagacccagttgcgaggcagtcacaggggacgggaaggtggtgggtgctgctgttctgggtgaaggggcaagagacaaaactctaaatacacgcggagctgggttcaacccatgcaactgtaagaggtatttctgggatgacttcgggcaggtgaacaggaaccagtctatcagtcaaggtaccagcaagaaggcagctgcgccatccactgagacacagaaacggctcttggcagagggaccaactcaggaccaaggcaggatgctgaggaatagcaggaagccaaccccgctggggaagaagcagagcctcagagtagccccgcggtcctggtggagagacgcggccccgtgaggagggcgttccgtctcagtcccagccactccactctgcagccgtagcacaaagcagacacagataagacatggacagacaggcatggctgcatccataaaagtttattctcagataatgaaatgtgaatttcatgattttcatgtcatgaaatatatttttaatttgttttcaaccacttttaaaatgtaaaaaagccattcacaggccatctatcaggccgtgggcaggatgcagcgcatgggcctgtctgccagaccctattttaggtgaagatgccagcaagaccaacctgaacctctcctaaaaccaagactttcaaagcagactatgaatgagaaagcatgccctgcgccagatgccctggcagcgtgaaggaggccaggctgcttgtacaggacagtggcccagcatggcccctgccttctgaaacccctgatccccagcagagaggagtgggcctcagctttgcagacagcactgtttccagatcaatgttaaaaggaaaacaaggcacttatgaaaaatttgaagcattccagcttttgatacacaaaaggattctgagtacccagcgataccccacatcatagtcatcgccagcatgaacctgttcctgtgtggagacttcatcactggacagcaggtaggagccggcctgaacgaattaagtgatgtacccagaagcctgcccattgcagaagcctcttcccaaatcacgcggcgcacacctcactcacatgcagcgcacggtcacgcagtgcgcacctcacacacacacagcgcacgatcacgtggcctgcacctcactcacacagcacacgatcacgcggcgcgcacctcactcacacagcgcacaatcacgcggcgcgcacctcacacagcgcacgatcacgcggcgcacacctcactcacacagcgcacgatcacacggcgcgcacctcacacagcacacgatcacgcggcgcgcacctcacacagcacacgatcacgcggcgcgcacctcacagcacacgatcacgcagcgtgcacctcacacacagcgcacgatcacaccgcgcacctcacacacacagcgcacgatcacgcggcgcgcacctcactcacacagcgcacgatcacgcggcgcacacctcactcacacagcgcacgatcacacggcgcgcacctcacacagcacacgatcacgcggcgcgcacctcacacagcacacgatcacgcggcgcgcacctcacacagcacacgatcacgcggcgcgcacctcactcacagcacacgatcacaccgcgcacctcacacacacagcgcacgatcacgcggcgcacacctcacacagcacacgatcacgcggcgcgcacctcacacagcacacgatcacgcggcgcgcacctcactcacagcacacgatcacgcagcgtgcacctcacacacagcgcacgatcacaccgcgcacctcacacacacagcgcacgatcacgcggcgtgcaccacacacacagcgcacgatcacaccacgcacctcacacacacacacagcgcacgatcacgcggcgcgcacctcacacagcacacgatcacgcagcgtgcacctcacacacacacagcgcacaatcacaccgcgcacctcacacacacacagcgcaggcaccaaggagttttgcctggtatattcggttgctgctaaacattcctaggaagttgagaaggttcatccttgctgatcggtgattgaaattcagcaacatccctgtggctctgcagtgtgtgccaaggtcaaatcaaatcataacgacgtcctcaatcacctccctgtaaaccgggtgccagccaggcccgtgctcacacttcctgaaacaagttcaccatctgtgccaccgatgccagacagagctccctgcgactccgaaacgtgtttctcacttcccacaagggagccactctccaggagcagctcctgagcacaagggctacggctggggctggggcaggctcaagcattcgtgctgagtttcaacagcctgtgtggcgagcagctactgcgggacagcacgtcacctggatgctgagacggcggaacaacatgaaaacatccaccatgccagaaacgtcagcccacagatgctcctagaggaagatgcagcggacacgaagggcggtatgagaacaggagaaacacagacagctgccgccaccaccggctcacacgcagcctccgacatgaaaagaaagtgcttcaagagcttccactccactggtctggcttcccttcaaccagaaagggggcacaggcacccagcaagagcctgtgctggtgacacagaatgttctttctagagcccaggggacagccccatcctctgagctggtcacaactgatgtcaccttttccttcttgaagggacatgccaggatgcaggggaacaagttaaaaagcttttcctaatttgaggtgagagacaccactgaccgccacgatcagcaacttagcgtcgcctcccccggtctcatcttcttggcatgcccgtcgggcccaggcgggggactccggcgccgctgcttcttctctagctgctgctgcagtctctcctctttcttcttcaggtaggaggtcacgttgtcgaacgtggccttgtagagactgctgaagctggcgtctgcgccggcagagcctgtgatgggggaacaaggacaggtgccaggtggggcaggaacatgggactcggccaccacagcgggccccctgcagcagggagttacctcgtgactcccagagtcctcggtggaccgtggggggcgccttctgggacggctccccacggtgcccacctcctgggacccacaccctggctggacctgaggactggctactaacagaacggggcaaagatgaaagaatgtaatggaaaccagggcaccaaggctgggcctccaccccgccagcactctctgcttgcacgcccggagaaagccactactgcaccatgagccgccctgtggaggggcccaggtggcaggggaccaggagcagcagcctctggccaacagccagagaggccccctgtcctgccgacaacccagactgagtgaagtcgggccctgcctggtgaagctgagatggccacctgcagagacacagctcagctgagtccggacccctgacccacagcaacagtgagacagtaagggtggggtgccttaaggcatcgagtgtgggatagcatgttctgccgccacagggaatggacacggatttcatctactttatctaagtgccaaggattgggggcaatgactgaccacaggcacacggagacagcctcagcctggccaggaaaccacaggcccagccggtaacccgcgcaccagcgactgcctgaagcctgcccatccagcaggtggcgcagcctccccgcccctccagcgactctgctgcttgtgggacactctagcagcagccctccccggtccctctcccaacgcaggcccccaagtctgcgccgggaacaggctgctctatctatggaacatctcaggagagcgagcccaggctttggcctgagactgttgtgcaaggtgacactcaacaggtctatgctgtccgtggcctagagcacgggggccatgagcactgcagatgcccggccatgagcactgccgcctgcagtccctgacacagccagtgacaggcccactctgaagtgttcctaaagcagatcccaaccacgctggggggcccaaccctgcccgtctcaaccctcaacatcctaagcaaagcaggagggagagaagcctcagaggcagagccagcgtgccgccactcggggagcctggcagaaggcggctgggccccaatcagcggaaactcctccgacctcagtgtgaatccctccagagctccaaggaacctcagtgctcactgcagtggggtttagctttgcaagacttcagagcagcaacttcttgtcgtgaatgaggcacctggattccatgctgggctaatccatcctgcagacaccatcacctccaagactgcaaggtgctggcacaacgacgcacccagaactacagtgtgtcgtgtccccagaaggcagggtagaaaatgttcgtccagctcctccctcagcctggctgctctccttcctgcagccgcagccacgggagttgctggctagattccctcccctcagctgagtgttcctgtcaggacagtgaccatcctgcccctgctcagcctcctgaagacccccggggcctctggctagacccccactaaacctcccagtgaggccctgcacttactgacgcccactgcagtgggatcaattccctcaacaccatggaccaggcatgaggcagcacagcaccagctccctctgggagccaccagctgccagccctgccctggggaccttcaacgcccaactctgaaggcaggtgctcagaccctgagcccccggttcctaagtggctctcgttagcctgactcccatggggggctccttcttctgctgtgcgtcacccacctcctgccctgccccgccttctggatggggacacacgcttactctccctctttatctgcacaccaggtaccccgggcaggtcacagtgtgtgcttctgctttctctggggaccgcgctgggtgtgacccccaagggcagcctgcacccgtgctctcaccttccagcatggcccagttcccacgaagaacaccagagactttctttaacacggtgctctcaggaacagactgcaggcgacaaacaggaaatcttcatcagaaagaggcaggcctggaaacccagcaccaggacgcaacacatgctggccagagaggcttgcaggggaggtcccctcctggtgcctggggacccccattcaccttctgtggagacctggggaggcagcccccgcagctggcccatgatgccagggcaagctcttcacatgcagttcatcaacctcaggggccagcaggtgcgacaggcacccactggggacatcatgtggcctgccacttctcaggtaaaaagaactggatggcttaaaagtgcttccaggtcaggcgcagtggctcatacctgtaatcccagcactttgggaggccaaggcgggcggatcacctgagggtgggagttcaagaccagcctgaccaacatggagaaaccccgtctctactaaaaatacaaaattagccgggtgtggtggcgcatgcctgtaatcccagctactcgggaggctgaggcaggagaatcacttgaacccgggaggcggaggtcgcggtgagccgagatagcgccattgtactccagcctgggcaacacgagcaaaactccgtctcaaaaaaaaaaaaaaagtgcttccaaagtgctcaactgagctttggcaaatgggtacctactccactcaactccacagcaaccctgtgagacgcagggcgggcaggggcattgctccgttaccaggagcgatgcagacaaggtacagggttcgccccgtcccccagcaaggaagcagctcggcccgccgccctcgcccagagaccccactgtctccccagaggaaagcagctcagcctgccgcccttgccccctcctctacccggggctccacatgctcctgaggactcagccagtgccccaggcccgaggctgtgctaatccagcctccaagtgttagtcccacacacccttgccacactgagtgccaacttcatcgctaagtgtggtgtggggggccacacactcacccaaaaaaagaactgttgcagacatcaccacatgggacaagccagccacgccggcctggcacccggctcccttcacccacggtggaagccccagccactgccattcaggacacagaccctgggccccagaagtggctgagttgaaagaggcttacccatggacccaaaaaacatagctgccgccccacacccccaggcttatggaaaggcagggcataggacatctggaaggtgccgagtctcacctgccactggtcgcccacaggcctgtagagcaccaggggggcttcctggcagtcctggagcacccacagcccctgggtctcctcgaaagccacgtcccacacttggtgctggaacgccagctgctgcctgtacaccaactgctgtctgcgggcgtccagctggaagatgtagaccacaggagtgcttgccacgaagaaagagagcatgattactaggactgcaggcccacgggctccgctctgcagccagcaccccagacggtgcagccctcgccggtgccacctcaggagagcctacgctgaaagccccagctgcgccactcccaaatgccggcgccggggaaaccatggggtgacgtacacttttttaagtcctaagctctggagtggctcgtggtgcagcaatagctaaccagcacggtacaggcaggcagggcaggaggacgcaggccctgggctcaggcgcagctctcctctcacacctgcgtacttccagaacgagctaagagacctccccaggctgtcataaggacaagatgaaaagtgccgaaagcaccaaatagaatacctttcctgacacacacaagtcactcgggaagaagcagcagaactgcactccacccctaaacccaccttgtcagcaccgccaaccccagggggttcccatccgaccagccccgagccgggagtgaggtgatgccaccacgactggcccaggggaaagtctgtcatctcagaaggccaggcagaggctgctggtgctctttacgccaggggagttcaacgtcaggttgaagagcgctggctgagaggagccctcaccctcatgcagcagcagtcatcaaaagtgacattctcagagggaggtgctagaccaataccaccaccgttcaggacctcttcattgaggacgtgggccagtggccaacccgctaactcttccccctgcaggtctgcagaaccggaggccatagaggtgccgccgcagcttacccgtcgcacaggagcgccacgcagttctcctggcaccagaatgcaatcctggacgcggcaaacttctaaaaggagaagaagcccattaacttcacgccacctgcaggggcccgacgccgggcgctctgatccaacaagagcaagaccgaaggacgctcacgcccccacatatcaaggaagaggaaacagcactggaacattctggaatcagtggggaaaggagggtagctgattccctgtttcccaagcagatgacaaaagccccccagtggttctggcactccctgcagggcctgcgacagcctccaaagccaacaagataggtcagacagtgaggagaagagggagcggaggacacaggggaaaggaagagatgagagctacacatacaactgccctgtgagctcccacagttcctggcagaggaaatattaaaaatgaagaagaggccgtgcacagtggctcacgcctttaatcccagctactcaggagcctgaggcggaggttgctgtgagtcgagatagcaccactgcactccagcctgggcaagagtgggactccatctcaaaaaaaaaaaaaaaattttttttaaatgaaggaaacttccaggaacctgagtccacgtgaagcatgaaggaaaaggcctggtcctctcttacacagctgcctggcagggggcagaggccacaccacacagttctctaggaaatggaacagaccgtttggcgggaaactttgccaaggcctgggctttcagggtgtcatgagattgctccaagctggccggagaatgctggagtgggcctggccccacccctgccccacctggctggcagacccacaaaggtgcatgctcaagcacctccattccttccacttcagagcaggattagaggccttcctgtacattaactgtttgcatgcaacagggagacaaattatttcccactgacatgacgagccaccttcagaatttgaaatacgagatttccctcacacaggaggaagtctggcattgagagcaaacgtttccaacggcgaagtgacttttccactcaagtcaggcgactgccggtgtctacaagcactcagtcgcccaggagtgaacagaagcagctacctggggggcctgggggtccaccagctcctgcagactggccaggtgacagcagtgcagctggcggccgctcctgtactcccagagcctcagggtgccgtcctgcacaaaccaaacacacaggttagcacatggttgtggggcttccgtcaggtagggtgacagagaggacagctgcgtgtggtcggggttccactccgtgacagccatgccacccaccctcaggaattaaaggctctctgctctgactgtgtaaatcgctcatgcaaatcatcaaggacaacggtggggaacggaaggtgaccgattccctgtttctcgagtgccaatatgcccaggcagatgacaaagccaatgaggcagatcctagcaaaataagccaaggccgctagatggccaggttgtcatccgccaggaggccagaccacatctgctgtgcccgggccgggcatagacacgggcatgcacacaggtctgcgcagacacttcagcaatcatgcattcccacggggagacacgtgtgggctcatgagctcgtggccactgctccacttcactaagaatgacaggaaggacatggccatcagcaaccgtcccacgacaactggtacaacccttcaggaagccgacacaggaaccaagaggctccacgctctaaaaccatcatcaatggaaaaaagcgtttctcttttttttcttggttttatctgttgttatttttttgttgtttaattgaaatggggtctattccacactgcccactgcactgcagtggctattcacaggcttgctcctggctcactgcagcctctgactcccaggcccaggcaatcctcccgcctcagcctccgagtagctgggactacaggcatgagccaccatacctggcttaaaaaaaattcattacagcactaattcagtggagagaaataaatcaatactcattaaatctaatgagagagtgtctgtgcactatttgtaagtatttttaaatgactaaatgaaaaagatgaaaagtaaataccccaaacagctaacagtagatgcatatcctctgggtgccgaggtaagagtggatgtatgaatgcacacacacacgcatgcacatacacacgcacacacacacacctttctacaaatgtggcagataaacatggagaccaacacacacatctacaggcatttcactcacccccaaacctctctacgaagacaagaaaaagatgtttaataaccatgaacccactaagacaaagacaacaggcaagaagagaaggcagccgcggagagacagcaaggaaacctgggggctggaggccagggaacaaatgcaccagccacagagaagcccgagaggtgccaggacctgccaaagaccaaaccgggccaggcagcctgaagaccaaggtggtgaggggagctgtcaaatgtctttacaaagagaaacgggacctccctgatgcatcctcagccccaaactccaggccagcagaaggctctggggaaacggagccgaggggcccctgtctcggggatgccaaatactcactgagaagagagtcacctagccccttcgcactcacctcccagagccccaggggacagacctgggcaagagtgaaggccgggacactgaccacccagaagagaccgactgacccacacgttctacggagtccacaggcaaggggctgctgcccacagacacctgctctgaagcccctcgggccccaccctgggtgcacacacccagcctctgaggccggctggtgctgactcccatcacacacaggcagatggcatcgccagacatccgaggaaaacctccaatgagaaaggcagacaacacactccagagaaggcaatcaaacacaaggccaggaagaaattgaagaaagaaaagtccacgctcatctcagtgagataagagacacgtgcactatccgagaatgggtggctgcaaaaaagaacgtgccgagggcaagaaagaactaaagattcaaaataatcctaataaaactcaagtctccacagaaggctggaaagtaaagttgaggcaatctcccaagaagtaagactattcctaaaggagtagaaatacgagattgaacaggaaagaaaaaaaaacagagaattatggcccagcatggtggctctcgcctataatcccagtgggcggaagtgggtggatcgcttgaggtcaaaagtttgagaccagcctggccaagctggcaaaaccccatcactacaaaagtataaaaaattagcggggcatggtggtgtgtgcctgtaatactagctactcgggaggcctgaggtgggaggattgcttgagcccgggaggcagaggctgcagtgaaccgagatcacgccactgcactccagactgggagacagagcaagactctgtctcaaaaaaaataagaatcagagcattaaagtggttcaactaacacaagctttagaaaaagtgagcaagaggcaggggtagagaacagaaggtaatcatgtaagaaaatgccccaggtcggaggacactgaaaatcactggctgtgtggccaactcccctctggggcccaccaagtcacctcagtggctttcacatcgcacactggagcagagaaagtcctccaggcagaaggagagcccagctgtcaccccacggacccacggcagacagctgcaggtttctacaggaagcgcgcgggaaaacccacaggagcaaccagctggagagcacactgtgcaaggcctcccaagctccgagggaaaccgtttcaaccaggacttctacgccaaactaacaaccaggcctcaaaggagattaaaggtatttccagaaaagcaaagtcagaaaacactgaccctcctcgcgccttttggcagctaccagatgacgtgttccactcaaacaaagcagtaagccatgagggacagatggggcctggggaggcttctctgcccgtggaagattttcctcatattatgaaaaagactggaaggtgcacaacaaaccgctgacgaagcctgaccctgaccctgaccctctggagattatggccacacttttcttcttctctcaggtcgcgtggctgtgtgttaatttgaagagcaggaacaggaggctgtgaatgaagcccaatcagagaagaaacatagaagcggccagaaggtccatcagccatcctgccacaccacacaaaggaccaacacagacaacacagggaaggacagcgaagaggaaggtggtggtgtgcgggcaacaattccgcaagaggacagaatcagaccctgtgaggaatccaaggccctcactttggcaaaatcactaacaatccttctaacacattccttagagaaaacacgtctctcatcactaaactgtaaggcttccaggacccaattgctgggacacagaagctgtacccaacaagcaaaaatgcactgtggtaacccgggtgcgggcgctcgagcctgtggtcccagctacttgggaggccaaggaggcagatcgcttgagcccaggagtttgaaaccagcctgaaaaatgtagcaacaccccatcttaaaaaaaaagaaagaaagaaaaaaaggaaagaaaaggaaaaaaaatgcagcccgtaatgggatggactgagacccctccaagagtcagagaagcccccgtctactgtttctacctgagatcctgatccccgataccatcgtagatgcagcagccgccctcagaagggagccttccacacacccgtgctagttcatcccacaggcgaacacacacgcacctacgcacaccccacacgcagtcctgagtgagcggccgcaggcggggagcgagccgcaggcagctctaagatctagtggacagccacagccagccaggggccagcgatccacaggggccaggtccaggaggcgcccaccccaccctccctgcaggctcaagaatccagaggtgagtgacgctgggcagaacacttaccccagaggaggacagaagcagcccgggctgagttggcaccacggagatacggctcacaaacctgtgagggcgagagagagcggcagagtcagcgagcccagcgcccgcagggaccgggaggcctggggaggccgcctgttcatctaaggaagagaagcctctgccctaaaccccctgatccaataaaaacagccaacatgggaagtagctgttaaccctaacctggttagggttaaccaggtggaggcccctggacgcagtcggggaggtgagtgaggtcattcctgggtccccaacagcacagcaacctctaacccaggccgctcctcagccatgcctgccagagacccaagcgcctctgtgcccctctgcagccccctctgcagcagctctgctcagcggcacctctacaggccccccagcacccaccctggcccaaggcacctgcactgtgatgaaaggagccttgggggagactcaaagacacgggggagactcaaagacacagcacacagggaggagggtggagggaggagggcagccaagcccacaggttcctatcagggtcctgacggcccctcagcaacaactctgagtgacctggccagacagctgtctctgctgagcccggcccagtcctcctgtgaggggttggcctgcaagcacaggactcaaagtcacagggaccctcccatcagaacagccatgaagaataacccaagcagcccagctcgcctggaaacccatcttggctcgggcacctacaagggtgacaaggccccttttcttcccactctaacacagtggcctcaagcaatccctcatgcacggggttcccggggaccctggaatggggtggcccgtgagcctcactccatctccaccagtcatggcctctgctaccttgggctagccatcgcgtgagccgggcccggtcccgcagccaccgccctgcacggcaccacagcaccaacagcagcccacagcccaggacagatagggcacaggacgccccgtgcagagggcacgagtggcctcacagttctcaacggtttgaaaggccgggaaaccagtttccaggggtctgaaacaaaatctcaaaacataattcgtccaatcactgcagttatctactgagcacctactcatgccaggcaccacgctgagggctgcacacaccaacaggcccaacagacccacagaaccactcagacgcagcgggagacggccagtgaaccaactgatactgcaatgtcagcaaagggcacagaacagcacatccagcagaaacacacctccagccacacacaggggccacggggctttgttttcaatttgccagccactatgttgaaaagtaaacgggcaggccgggcacggtggctcacgcctgtaatcccagcactgtgggaggccgaggcgggcgaatcatgaggtcaggagatcaagaccagcctggccaacatagtgaaccctcgtctctactaaaaatacaaaaaaaaattagccgggcgtggtggcaggggcctgtagtcccagctacttgggaggctgaggcaggagaatcgcttgaacctggaaggcagaggttgcagtgagccaagatcacgccactgcactccagcctgggcgacacagctaagaaagagaaaagaaaggaagggaggggaagggtggggtggggaggggggaaggaagggagggagggagggagcagttgaagttaattttaatactatgtttttactcaatacttctaagtgatgaagcatttccctagaagggtgagaagcgtgttcccgtcagcagaaacctccctcacgtgcctggcgaggcaagggagctgcagagaccccagcgagagatggtgaaggggaggggccggggggctgcaggccagagaactccagagctggatcactagcgaactaaatgcaagtcagaagaagctatcctgaggcacacaccagtgactggccttcttaaacaggaaatgtttggatcaaaaccaggaaaacacaggcaacctcggcactgaatttcctccctccaatttcttccactgcctcaaataatatattttaaaacatttcagccaattacactaagcgtttttcctttgtgtaaattctaatgagctttttgtgtgagacaggagcgggcattcagaaacacctccacatgggtcctggcagagtgtgctgccacgagagacgccgccacctggctgcagaggccgcttaattcttggacagctgaaatcactaaagttcatcctcgcccccaacacccccaccacccaccagcgaacaactcccgggcatggtgcaggggtctccacactgagacaggggtttcccggaaacaagcccttcctgttcggtcaggcccaatgccaagttactggcacagactccgggtaacagcgcagagtgaaccccaccctttcagggcttctgcaggcagcaccacggcgcctgcagtgaccaaacaccaagcacgggggctgctgtcacccgcgtggggcctcgccagctacaacggcacctgctgagccgcaagctgacgctgttttcaaacagaccttctttctgctggaggggcaggaaggggcactcactctgtgtgccccaagcagaaggactcgatgctatggggcgccgcggcccagctgactcggatcttctcgtcccggtcggcagtgaggatgaagcggtcatcaggactcacagcctgcatcaccaggggccagaaaagaaaaagccgctcacctgagtcttcccgaatcaagtccctcatggaagaaggcagggaagctgcagcctggccgccaagaggatgaggccttcgaggacagaccagcgtggctcctcccctcctcccgtccctacgtctaattggtggccctcattctccctccccagagggtccctggccacctctagccctcactcctcagtgctagagcaggcttctggggtggggcagtgccacccctgcctgcctgtctcccgcaccttggcaaatccaggccccacgcccatttccacccgccacaggcctgctgcaccctcctgcccaacactgggttgccttccttgccttcctgtcacacatgtccccacacccatctgtcaccaagtcccagtgaggttccctttgataccccacactcgccattgttcctgactgtccctgtgtgcgtccaatcccagctccaccacccgggctgtgggcctgcgccctctggggctccaggtgtgtgtctgtgacacacggggcacacagagtggggtgacaggggctgctgggagcagtgctgaggtgatgctcctacagcacctggcacagctcccggccaaggaggcggagccagaggctcgtggctgcacctgctcctcccacaccttcacttccaacctggggccacctactgaccacctcctgtctcacttgccttcttcattctccctgctgtctgctccaccttcctaaatcctgttcccaccactcccctgctcccaaatctgcagagggctgtccctgctacgggggagccccattctccccaccaaacgctggggcacagaccgggcagacgttgattcagcctgtaccccacataccatgtcccccacgtactgcgtctaacagcatggacaggtgcctgagccttgacagggtagacattgactcagcgtatgccccacgtgccacgtcccccatgtaccgtgtcccacacctgccatgtcccccacctaccacgtcccccacctaccacatctaacagcatagacaggtgccccagctctagacggccacacccgtgtggctccagcaccgaaaaggagtagacgtctccagacttgtcggccaccaagaccttctcctccgaggctatgaaagtcagggctgtacacctccttgccacggtcctagaaggccagaaagacacccccattagcttccaggagcagcgcagggtcctcgacagcctggcaggccacgtgggcggtggcaggcaccggtacctggccatatgctctgttttccagctgctgaaggtggtgccaaaaaaattaagcaatgctaacaactggaacaaagccaatgccttcgacaaatttactttcacaacgtttttctttaagaaaattgctcctagccgggcgcagtggctcacacctgtaatcccagcactttgggaggccgaggtgggtggatcacaaggtcaggagattgagaccattctggctaacacggtgaaaaccccgtctctactaaaaatacaaaaaattagccaggcgtggtggcgggcgcctgtagtcccagctactcgggaggctgaggcgggagaatggcgtgaacccgggaggcggagcttgcagtgagccgagatcccgccaccgcactccagcctggggcgacagagcgagactccgtctcaaaaaaaaaaaaaaaaaaaaaaagaaaagaatagaaaattgctcctgatggtgggatctaggtggtggataaatgcgtgacaaaatcctcaactttcctgtgtgtttgaaaactgtcatcaagaaatgggggaatggttccttaaccccagagtcttcatcatgcattgagggagacaacggccctctccataaacgctgagtgtgctgggggccactgtcaaggacaaaggcaggcaccagtctccagggccccccagccttgccgctcccctgacccacactgacccctgctgctcgttctgctgcgtcgaaccaggagcctcagacagagagccgtgccccatgccctgcagagggatggaggggcctggccaccctcagggcaggacccagcccagggcagcagtgaggcagcaccctaccctcctcgggaggaagctcggttatccagcgtgtgagaggcctgcgctccccccagtccacatccacatcagcacatccatgaatccaaccccgacccagagtcatggatgcaccagagttccggatgcagcacgtttgcacactgcttcagcaagaaccaaagtcacagttcgctccctctccttcgccagggctcagggctacactacttcctggggctctcatttccacatcatttctactggaatcgtcccgtatttatgtcctctccacaaggcagggacccatatgttctattttacatagatatgagttgtagcacagcttcccacacacgcagttagccacagggcctcactacagaacagcagccagccctgcttccccacccccagggctgtggcagcacacactgcccaatacgcagccaacaccaggcagacaagtacagggcgcccggcccactgcggctggaaattgagatggaagcttcaggaacgctgtcctcaatgaggcccctatgtttctctcaggggcagagggactaaaagacagaaaagggcaggcaggacctttgggccacaccccaggctggaagcagcatccctcctcctccctcacagctgtgcagcagagctgcagaagggaggcagaagggaagtataacggggtaaacacagagaaaacaaggacaaagaaagataattacgctctggggcaagattaatcagaattctcagggtgcactgcaatttaaacaaacagccctgcactgcaccagcgacacagcccccaatgtccgatgggctcattaagcagctgccacaaacacgaccatggtggcacagaggagcagcccaagaggatgccacagggaggggggatggacttggactcacagggcgctcatccccccagcctggctggaaggcgtgtggcacagatggcccccgacaccgtgcctcctgcccagctcagcagagggcactgctccgcgtccctttgtcctgccccagccggaggctcccagcctctccagctgggcttatcctggcaccgattctaggacgcagctgagccttactcgcaggcttgggtgctaggatccaagggaggtcacagaatggggcaggtcactggaccaatggcaagccggcctgtcaccctagctgaggcacaaccccgcccgccctccaacccccagcctgtgcagggtctcgggtctcgggtctcagcactccctccacagtcactgggttcagggcccagagaccagcagaacctagcaagtaaccacccatctccacaccctccgttctctgccaggagtcgagtggctgagccctgaactcccagactgagttggcactgccccaagcccccctccagagagccgcctgggcagccccaacagggcactgaggacaccaggcaccatccacacccacactccagcagccaggtgctctctctccaccccctgggcagagcgaatcagatggttctctggctctgcctttcccacgtgctgccgtggctctcacagttgttttcggaaacacagactccactgggaggatttctccctcataaacacacatgtcaaaatcaatgtatcactcgtcaccctgtgtcctcatcttcggcttggaaaacctggcctcagtccctcgggccaagagtctcctgactgcccaggtggcaggccctccgtcccttgcggttctaaactgctacctgggaaagaatcgttgctgcccacaacttccatcttggctacgcctcaaaacccttcaacaggaagcttcccagcagcagcacagtaacaaagcaaccatgggacagagcctagggtctcgcccagctcaggggcatcctgcagcggtgcagggcctcagtgaaatgcagagaggctaggagtacatggaacctctaaaactgaatggaggtggatgtgctaagcgtgggcggttttctggggagcgggtgcatcagatctaagagtctgagatctaagaggcataaaaagcctccaggtgtggggagcagcccccatgtttgcggaccagccacagggtgctgcctgccagctcagcatggttccactcaccctagtcctctccttgaaagcagctcctgataaaactcaccctatgcccctctccctgccccactcgcatcccccaaacctactcctcctgccacaataatcccctccaatttctcactgagagaaagggtaacaatttcactccacccgatgctgaaaagttcacaaacccacaattctaaaggaattttaaaaagattattgaggaatttgccaagagatgttgaaagtggcagtaacttcacaactgtacccactgtcctgcagttcaactagagaaaggggaggcagcaaggcgtgccctacaccaaggtcaggagaaaccccaagccacaccatcgaggcgggattttgtaatctgctgcctggactgcatcaaatcacatggtccatcttccacaccacctaaggcaaacatttcctacacgaagttatactgctgacatcactttcaaaaccaagagcaggccgggcgcagtggctcacgcctctaatcctagagctttgggaagccaaggtgggcagatcacctgaggtcaggagttcaagaccagcctggccaacatggcaaaaccccatctctactaaaaatataaaaattagtcaggcgtggtggctcattcctataatcccagctactcaggaggctgaggcaggagaatcgcttgaacccaggaggtggaggttgcagtgagccaagaccgtgccactgcactccagcctgggtgacaaagagacactccgctccaccaaaaaaaaaaaaaaaaaaaagtgaacgcacaggtaaaggggcactgccaagagccaaacactgctctttgctcacatgctgcaggctgcccatccctcatcccaaatgctcgggacgaaaagtgctttgcacttcagatttgttcaggttttggaatatttgcaaatacttactggctcagcatccctaacctaaaaatccaaaatccgaaacattccagtgagcatttcctttgagcatcttccctatgctcacaaaatttcggattttggaggattgtgaatttcagattaggggtacttaaactagatgcactgcccactcttggacttgtgcttttttttttctttgtagatacgagatctcactatgttgaggccagactggcctcgaactgctggcctcaagggatcctctcaccttggcccctcaaaatgctgggattacaggcatgagccaccatgccagcctcccagagttttaccaggtgcttccataaagagaatcacaccagcacacaaccttcaaaagacgagtcaacacagcaagacatctccctcttggcaaagcacctacaaccaaggatgaagaggccccccacccgcccagcctgcagcggtatctgcatccaccacgagtcccaactcatggagctctcaacctcaaatgacctcctccaagaagccaactgccacaggcaaccacattgagtggagagaattctagattcctccctcctctgggccatgcacgatgccaggagcagaggccccgtccctctggaggagtcagaacccctggaggagccctgggcctccgcgcttccatcagggtgaagaagctccactgttaggaaccaggacacagcgggcaggcagactggacatcccctctctcccaagttcaaagtgagacactacctctggacagcaagctcacattgaagtaaggtgacattccacccacgtctccatctttctggcaacctcagaacttcacagccgcagcactgtccagacttgaaagagtcagcgtcttcaagacacgagtgagctccctgcccgctcacccccaccaccagccaggcctacggcacacacggccagacccagcctcccctaccctctgcaggcagtggctactcctcaaatggtgtctggtaccagacatcaaaagccttggcacagggtacaccctctgcatagtgaagaattaaccttgcctttggcctcatctccaagagtaggggccttgggccccacaggcagcctaagtacgtgatttagggcaggggcctggggccacaaggtgtccactccacctctggaggggctgggaactaaaagtcagccacccccacagcatgtgatcaaccccaaggaaaccgctggacaccaaggcttgggaagcttcgccgtgtctgttgtcacacattggtgccagtaaacccacactgtccacacctctgctgtcccagttgctctggctcaaacttcccgaagtttaaaggcaggaagaggtacaaggaaacactagcatttgagcagtggaacagtgcaaacaatgtaacaactcagctacagggaatgacacagtgttgtcaacactgccctggcgggggggaacaggctataggctagcacatgccaccactacagtgtaacacatgcaaatcctgtaatccatctgcagagaggaggaggagggcctggccccagtgctcatcccatactctggctctgggtggtgaaattcagggtggtttttgttcttgctctcattttgtacttctcagtggtttccaattttctgtacggaccaaaaccaaaggataaaaaaggcaaaaggtagcatgagaggacaccgaactgtactccaggggaagcagacaagtgagaattcactcccaacttctacaaccccactcaccatagctgaacgggaacccacacactccactgttgtctaagtaactggatcacgtctgagatccgtgtacacatcggcacgtggatctcagctctgcacttgttcttgaccccagggctttgaagttttgtcagctaaggcaagggtattggaaaatgctaatccagtctcagtggttaccggtgcagctcaccttacacacctgtgccacagaaaggccgtgtgagaaaggccatgttgagagccacactttgggagatgggcttattttgtaaaactaaagtgtccaaatataaagagctcctacaaataaacaacaccccaatggaaaaacataggatatggaaaaaaaaaaagtttacaaaacacaaatgattcttaagtatataaagagttgctcttctggccaggcgccagtggctcacacctgtaatcccggcaccctgggaagccgatgtgggtggatcacctgaggtcaggagttcaagaccagcctggccaacattgtgaaaccccatctctactaaaaaaatagaaaaaattagccggtcgtggtggtgcatgcctgtaatcccagctactcgggaggctgaggcaggagaatcacttgaacccaggaggcggaggttgcagtgagcctagatcgtgccattgccctccagcctgggcaacaacagcgaaactccatctcaaaaaaaaaaaaaaatgctgaccaccagtagagggatagtcaagaaaactgctgtagctgggctcagtggctcacgcctgtaatcccaacattttgggaggccaaggtcagcggatcacctgaggtcatgagttcaagaccggcctggccaaaatggcaaaaccccatctctactaaaaagacaaaaattaactgggcatggtggtaagtgcctgtaatctcagctgctcgggaggcggaggcagaagaatcgcttgaacccgggaggtggaggttgcagtgagccgggattgggccactgcactccagcctgggtgacagagcgagactctgtctcaaaacaaagaaagaaagaaatcacagagcatatggcctagcccagatgaaatgaatcacaaagtctgtgctttcacaagacacccaagcggctcttgtgcactatgcctatgccaaagctcagccagggcctttactttaggaaaagaattaccaggccaggcgcagtggctcactcctgtaatcctagcactttgggggactgagacaggtacatcaccttgaggtcagagttcgaaaccagcctggccaacatggtgaaaccccttctctactaaaaatacaaaaaattagccagacgtggtggcacatgcttgtaatcccagctacttgggaggttgaggcaggagaattgcttgaacctgggaggcagaggttgcagtgagctgagatcacgccattgcactccagcctgggaaacaagagtgaaactccgtctcaaattaaaaaaaaaaattaccatcagattcccttagatcatttcatttttaacttttgggagtccaagccccctttgagaatctcatgtgaattatgaaagctctctacagcagccagtgtccgaaaggcaaaatgaactgttatgtgcttaactgaatcctccaaaccacaactcctatgttgaagccctgacctacctaggacctcagaatgtaactgtatttggataggacctttacagaggtgaaacagaggtcattgggatagccctgaccccatctgaccagtgtcctttcaggaacaggaaatgaggacatagacacaaaaggacgactctgtgaggacatagggagaagacgccatcagcaagccaaggagagaggcctcagaggaaccagccctgtcctgccagccccttgatcttggttttccagcccctacaactgtgagaaaattgttatttaaggcccctagtctgtggtatcttgttgggcagcccaagcagactaggacaactactatcttctttcaacactgagaggtgaaaacctgtccatccctccttcccacaggttgtccaagaaacccaaagtcaaggccaacctactagaaagcccctgccacctgcagagatccctgtggaggggctcagagcaggacacctcaaggccaccttgaggcattcaccctgaatcctgaaaacacttcccatcttctctattctaggtcctaaatgacttactcatgtggctatcttagcaagaggatgccgttcacaggcctttcaagataaagatgacgcgatccacagcagtcaggtggaagcagccatttattatcagttataactcagacatgtagggacatgcatttaaaagtcattttcctactgggaaaccatcactgcctatgggaaaggagccagaaggtgggtaagaagggagactgacgcatactctttggtttaattttgttgtgttttaagtttttaaaccatgtgcatctattacctacctgatacacaaagacacaaaaacatattgtaaatcacatatacataaaaacatatatagtaaaacccgtatacacaaaaacacatagagtagaaatgatgcagcgtttcagggctttctttttaacctgactggaagagaggacagagcaggcattcattgcttttgatgccacctagaatttggctttttttttttgagacggggttttgctcttctcacccaggctggagtgcaacggcatgatctcggctcactgcaacctccgcctcccaggttcgggagattctcctgcctcagcctcccgagtagctggaactacaggcacgcaccaccatgcccagctaattttgtatttttagtagagacggggttttgccatgtgggccaggctagtctcgaactcctaatctcaggtgatccgatccgcctgcctcggcctcccaaagtgctaggattacaggtgggagccactgcacccagctgaatttgggtttttactcttctctttgaaaataagatgaggctgggagcggtgggtcatgcctgtaatcccagcactttgggaggctgaggcgggtggatcacctgagatcaggagttggagaccagcctggccaatgtggtgaaactctgtctccagcaaaaaatacaaaaattagtcaggcatggtggtgtgcacctatagtcccagctactcgagaggctgagatgggagaattgcttgaaactgggaggcggaggctgtagtgagccaagatcacaccaccgcactccagcctgggtgacagaatgagacccttctccaaaaaaaaaaaaaaaaaagatgaaataaaaatcttaaagacaggccgggtgtagtggctcacacttgtaatcccagcagtttgggaggccgaggccagcggatcacctgaggtcaggagttcaagagctggcctggctaacatggtgaaatcccatctctactaaaaatacaaaaaattagccgggcatggtggcaagtgcctgtaatcccagctactggagaagctgaggcaggagaatcacttgaagccgggaggtcgaggttgcgatgagcaaagatcgcgccattgcactccagcctgggcaacaaaagcaaaactccgtctcaaaaaaataaaaaaggaggaatagggaaggcagaagaacctttccggactttgctaagtaagagggcaaggcatagcgatatctcccgttcttgccagagttactggcctccccatccccacggatccactccccatccactcttcagatactcagacatatgtgcactaaacccacctagcttaatactatggtacagacccctcaacagaccccaaatccctatcactctccagggcaggctcacagccttgttcctgctaatcacaaggacagaggactgccctggaaaacaggggcaccaacactgtaggtggagggaccagcagcagggcccggctctgtcttccgagcccactgatcggagtctgctatctaactgttcaccacccagcgtgggacagaacagcacccctgcaccctcccagaactgccgtgaggatcagatcagccaacacacatgtggcactgaaagtggtgtctggcactgaactgcggctccgtgtcaaccacttatcacccttatcaccatgttatggtcactattgctacaggcatgcaaggataaggtgtgcattcgacatcttaagaatccagcgttagcatctcatacctgacactcagacattgccatggttttgtacggaaaagaatcagacgcttactgtcatcggttaaagcaaaatagctgccagacttggagaaggtggacgccagaatcgcaccgctcccctggtccaagggcgcgtcctccctgaggaagagaggaggaagacggttaagcttcacctaaggaaataaggctgcattccttgttggccagcgtggtaatttctaacatgggaggaggtagaaactgttaaggggatcacgtagccaaaatacagacatattaaagggacatggggaagttcaaaacagctctaattttatcagcatgaagcctaactaaacagaaaatctcccagcatacatgccagaacccagagagctaagctggaagaaccctcaatgacacatggccctcttcctcatgggcaaggactaacccaaggctagaggcagggataaactcacattaacaatactaataacaggccaggtatggtagctcagacctataatctcagcactttggtgttgcgagaagtcagggaccccaaacggagggaccagctgaagccatggcagaagaatgtggattgtgaagatttcatggacatttattagttccccaaattaatacttttataatttcttatgcctgtctttactgcaatccctaaacataaattgtgaagatttcatagacacttatcacttccccagtcaatacccttgtgatttcctatgcctgtctttactttaatctcttaatcctgtcagccgaggaggatgtatgtcacctcgggaccctgtgataattgcgttgactgcacaaattgtagagcatgtgtgtttgaacaatatgaaatctgggcaccttgaaaaagaacaggataacagcaatgttcagggaacaagagagataaccttaaactctgaccgctggtgagccaggcggaacagagccatatttctcttccttcaaaagcaaatgggagatatatagctgaattctttttctcagcaaggaacatccctgagaaagagaatgcgcccctgagggtgggcctctgaaatggcccccttgggtgtggccatcttctggtcgagactgtagggatgaaataagccccagtctcccatagcgctcccaggcttactaggatgaggagattcccgcctaataaattttggtcagaccggttactctcaaaccctgtctcctgataagatgttatcaatgacagtggtgcccgaaacttattagcaattttaattttgccccggtcctgtggtcctgcgatctcgccctgcctccatttgcctcgtgatattctattaccttgtgaagcatgtgatctctgtgacccacacctattcgtacactccctccccttctgaaaatccctaataaaaacttgctggttttacggctcaggaggcatcacggaacctaccgacatgtgatgtctcccccggacgcccagctttaaaatttctctcttttgtactctgtccctttatttctcaaaccggccgacgcttagggaaaattgaaaagaacctacgtgaaatatcgggggtgaattttgcccaatatctggctgaatttcccccaatactttgggaggacaaggcgagaggatcgcttgagctcaggagttcaagaccagcctgggtaacatggcgaaaccacgtctctacaaaaaactacaaaaattaggcagccctggcgcggtgcctcacacctgtaatcccagcactttgggaggccaaggcaggtggatcacgaggtcaggagatcgagaccatcctggccaacatggtaaaacctcgtctctactaaaaatacaaaaaaaaaattagccgggcatggtggtgcgtgcctgtagtcccagctactcaggaggctgagtcaggagaaccacttaaaccagggaggtggaggttgcagtgagccaagatagcgccactgcactccagcctggcaacagggcaagactccatctcaaaaaaaaattaggtatgttggcatgtgcctgtagtcccaggtacttagggggatgaggcgggagatcacctgaacccaggaggtcgaggctgcagggagttatgtttgtgcaactgcactccaaccggggtaacagagagaccctgtctcaaaaaataataataacgataaaacaaactgagccacaataccaatgataactaaagaaagccaccatacgaaacactcacatgctctacttttatatctcaattagctgaagttaacttcctacacccgccttcaaccattacttcaaggagccagtaagatgtgattactgacagaaactaaaagtatttagaaaagtcctaacactgtgctttttttttttttttttttgagacggagtcttgctgtgtcacccaggttggagagtgcggtggcgcaacctcggccgactgcaacctccgcctcctaggttcaagtgattctcccacctcagcctcccaagtagctgggactacaggcgcccaccagcatgcctggctatttttagtagagatggagtttcatcacattggcaaggctggctttgaacttctgacctcagtcagcaccctggcttcccaaagtgctgagattataggcatgagccaccgcacccggcactaacactgtactctttttttttttgggagacagagtcttgctctattccccaggctggagtgcaatgccgcaatctcagctctctgcaacctccgcctcccaggttcaagtgattcttgtgcctcagcctcccaagtagacgggattacaggtgcctgccaccacgcccagctaacttttttatttttagtagagacagggtttcgccatgttggccaggatggtctggaaattctgacctcaggtgatccacccaccttggcctcccaaagtgctgggattacaggcataagccaccgtgctcagccaacaatgtactcttaatgcctaacctaaaagttacttttacatgtctctcctgaggtgctacttatctgcaccactgtgtgacagaagctaagaattcagcaagtaggacaacaattgcttcttagaccctctggtcccattatcgaaccattaaagcaggccctgaaaaagcttccccacatctcaccctttattttcttgtgacttcttttctgcagcactgcagtcatagatgaagaggctgtcatcatcactaaagagaaataacaataattttaaaaggagttatcattagagagaaataacaaattttttttttttgagacggagtttcgctctcgttgtccaggctccagtacaatggcacgatcttggctcaccgcaacctccgcctcccaggttcaaacgattctcctgcctcagcctccccagtagctgagattacaggcatgcaccagcactcccagctaatttttactttttgtagaaacggggtttctccatgttgatcagggtgatctcaaatccccaacctcaggtgatccaccaacctcagcctcccaaagtgctcacaggtgtgagccactgcgcctggcccatgtgagccactgcgcctggccctaatttttttttttttttttttttttgagttggagtctcgctctatcactcaggctggagtgcaagggcatgatctcaggtcactgcaacctccccctcctggattcaagcaattctcccgcctcagccttcccggtagctggaattacaggtatctgccaccacgcctggctaatttttgtagttttggtagagacggggtttcgccatgttggccaggctggtctcaagctcctgacctcagatgatctgcccgcctcagcctcccaaagtgctgagattataggcagagccactgcgcccagcctaacaatgatttttaaaagagcactttgttaaaaaaaaaaaaaaaaagttgattttttttctctgtggaacaaaaaatatttgcacactcattaaattaaaagttgtatacttgacaagaaaactgtctagatacaatatttcagggaacagttaacaaactttatttgcttaatctcttattggagtacgtcatactgcatagttctgtgggaaaaaaaagttcagtaaaacaaatgagggataaatactcaacaggaattaatatgctattcttttaggcaccacaaaatctatgcgacatggttataagaaattacgggccgggcgcggtggttcacgcctgtaatcccagcactttgggaggccgagatgggcggatcacgaggtcaggagatcgagaccagcctggctaacacagtgaaacccccatctccactaaaaatataaaaaattagccaggcatggtggcaggcgcctgcagtcccaactactcgggaggctgaggcaggagaatggcgtgaacccgggaggcggagcttgcagtgagccaagatcgcgccactgcactccagcctgggcgacaaagcgagactcctcaaaaaaaaaaaaaaagaaaaaaaagaaattatgttctgatactgttgagcgttcagtgggattctgtatacaaatttcaaagagccattactatttagaaacatatctcacctacctgaaagtgttcccatgaccccaggcacttaccaacataagaatcacccattttccatactgaacctaaacttcggtttatcccatcctcaccccctggcacgtatcttgtacatatttatagcctttaaagcgagtgcaccaaaaaactttccatatggaaccgtggacttgtcttccaagtcagaaactccaccagccactagaatttcctcaaaatgcaaagactgaaggtaagcaaatcatgtctaatatatccacagctcactctggcagatattagaccgtgagtctctaaaacaaaatcatctgggatatgtgacgggtttctgagtacaatttttgtgagacctaacttaacatcgaattggctttctaaaaccaaacgaacaaaaaatatacagtatatctgacagacacgtcgtccgtttcaaatatgaaatcacaaataacctgggaaaggaaacgaggggctgaaactgacagcactactaattgctccgagagtcctgagttaggactgttccatcaacaaacatttactaagttaaaaatcccctgcgtcgtcctagcactggcgatacactaaggaaggagaataaaattacggaaagcaaaacccgagccgtgcgaagggccactagggaggtgcgcactgcgagctccacgtgcacccttgggttgggtaagtgtcggagatgacttggagccctaaggagcaattaaggccaggtgagtggatgcaggccgggaagagggaacagacaaccctgcaaaaagagggagcgcgcttggaggtcagtgagctcgcagtgagtaagcccctcccttctcaccagggagacccgagacccgcttcttcccagttctgcagagcgtgttcggccgggccttgctgactggtcagcgtcgccccacgtgctctacctacccggtccccgccggcgccgcggagaccggaagcgacccggcggcgctaaccgggcaagaacaccgcagaccagccatctagtgcaaggagcgcgccggagccggggagcggacgccgagagcggacggcgaaagcggaccctccaggcgcagagacgcggccaggccgagactgcggcggaggactcgtgggctggagcggagttccccggggtcaccccagagtgggtgcgaccaggcggtgcgggagaagcggggtcgccaggacccgacgcgcgcccgcagcctggtctccctgttccaagaccaaggccccctcacctgcttgctatggaggtggccaggaatcggctgccgccccgcaccaccaacgtctgcccgcacaacgccagtcccacagagcccgccatgtacccgcccgcctcaccgccatacacatgtgccagcccagagcctcttcctgtccgcaccggtcggtgacgccaggcgcagacgccgagagatgacgtataccccacgtaccgcgcatgctcaaggacgagcctgccttgagcatgcgtgaaaggtgctgtgaccgccctccgggttgtggctggtggccttcggtgtttcgggtttggcagttcactcaccaaggtgatctgatggagtgcacttcgcacgattccaagtacttgcctaatgttcatcctttcctctagacggggtagggctggttctggatctttttccgcggtagctggagagacgtaggacctgatgatggctactagatgcctggtaaatgatccttcaagaagtgaatgaaccgggggccgtggctcacatgaagtcagcagttcgagagcagcctgaccaatatggtgaaaccccgtttctactaaaagtacaaaaatttgttgggcgtggtggcgtgcgactgtagccccaactacttgggaggctgagacagaagaattgcctgaacccgggaggcggaggttgcagtgagtcgagatcgcccccgctgcactccagccagggcgacagagcgagactctctctcaaaaaaaaaaaaaatgtccaagatgtggtcatgggtgagggtgtctcgggtggcgtcaagtctgaggtcgctagaagtaagcctactgaatctttgcacttagacaagccacagatgccttaaaatctccgaactgtagtgatattttcaacccaaactatggttagtttccagtgttcatcccaagatccccaaaagcctcttacaatcccagcatcaggcacaaaatctaggatctcacggtctgttttagattggcttgtccggtgcagctcctcttgatccagagacttacaaactaaaaagattaattttctctcccgtgcacgcaatatatgatggtgagccgggaccagataaccacaataaatacttgcatgtgaaaatgagaagaggaggagacacagtaatcactggtccaaagcaattctgaaatcctactggaagatgttttcaggccctacaagaataagaagtcttaaccaggcccgagttctgcttcctgggagtatctccccaggctgtatctcagcacagctcttgcctctgccctcttgggtgtccctccttttccagcaccttcttggccatgttgaagaatgtgccctttgagaaactttctcaacctccttcctgtcattagcaaattgtgagcccacagaccttttttcactctaaactgttctgtccacattttggcagctggtggtgctttgttcactacaagtcccttaaaagctttatgggcttctcaagaatctgattcaggtgctctccatgcccaagaagccactcccactagtcttttttttttttttagacggagtctcgctctgtcgcccaggctgaagtgcaacctccacctcccgagttcacgccattctcctgcctcagcctcctgagtagctgggactacaggcgcccgccaccacgcctggctaattttttgtatttttcagtggagacggggtttcaccatgttagccaggatgttctggatctcctgaccttgtgatccgcctgcctcggcctcccaaagtgctgggattacaggcgtgagccaccgcgcccagccacttgttaacatttaaatcattgagatcaccttgacttcagcattattcttaaggccatattttattagcgccactctgaatttgatctttggcccaggttatgacttactttgagaacttgttaccaactattgggtctaataatactttccccagcttcaacccaaagtgtgctctaaattctgctggccagtttgtttgtttgtttgtttttaaccacactcttttctataagtgtctcaacatattcaagcaaaagaaacacaggttaatctcaacattatactgatatgatctttttcaagtcccagagttcagtagttgcctttttctctgcccatcttactgaagggcaacaattttacaaatccttcaccgtgacatagagttgttcaccatttgtccacctcccgtagttttcctcaccattgttccagtgttcactaccagtttccccactgcttttccagacttctagtccaaagctaatgccacatgttacagtagcacctactgctaggtacaaatgtctgtagcatgcatatcttccttgtagtcctagatatagatcaacaagctcataaaaactatggctttctttttttctttttttttgaggcggagtttcactcttgttgcccaggctggagtgcaatggcgtgatctccgctcaccaaaacctctgcctcccgggttcaagcgattctgcatcagcctcccaagtagctggaattacaggcatgtgccaccgtgcccagctaattttgtatttttagtagagacggggtttcaccatgttggccaggctggtctcaaactcctgacctcaattgattctcctaccttggcctcccaaagtgctgggattacaggcgtgatccatgatccatgttagtcaggctggtctcaaactcctgacctcaggtgatctgcccgcctcggcctcccaaagtgttgggattacaggcgtgagccactgcacccggcccaactatggccatttttataaatcattgattacattagcctagagtgagtgtgggctttctttttcaattaagaaacttatggattggccgggtgcagtggctcacacctgtaatcccaacactttaggaggccaaggcgagcagatcacctgaggtcaggagtttgagaccagcctggccaacacggtgaaaccccatctctactaaaaatacaaaaattagctgggcttggtggcatgcacctgtaatcccagctactcagaaggctgaggcaggagaatcactagaacccaggaggtggaggttacagtgagccaagatcacccattgcattccagcctgggcaacaagggtgaaactccatctcagaaaaaagaaaaaaaaaacttatggattgttgtgttgtatttctagtcctgtcctgagcaaaaggtattaggaacctgagaatccttccattagcacaatagaaaaatgggcaaaaaggccaggcacggtgactcacacctgtaatcccagcactttgggaggccaaggtaggagaatcaattgaggtcagaagtttgagaccagcctggccaacatggggaaaccccatctctactaaaaatacaaaaatcaggctgggcgcagtggctaacgcctgtaatcccagcactttgagaggccaaggcaggtggatcatctgaggtcaggagtttgagaccagcctggccaacatagtgaaaccccgtctgtactaaaaatacaaaaattagccgggcatggtggcggacgcctgtagtcccagctacttgggaggctgaggcaggacaaccgcttgaacgtgggaggtggaggttgcaataagccgagatcatgccactgcactccagcctgggtgacggagcaagactccgtctcaaaaaaaaaaaaaaaaaaatagaaaaatcagctgggagtggtggtgcgtgcctgtagtcccagatactcaggaggctgaggtacgagaatcacttgaaccgaggaggtggagattgcagtgagccgagattgcgccactgcactccaacccgagtaacagagtgagactctgtctcaaaaaaaaaaaaaaaaagaaaaatgggcaagaagttaccctttttttttttttttttacaaactggcaagacgacataagcattgtcttatggtccttcagttaaaaaaaaaattgtgtaaaaacaaaaatggacaaagacccattaatttcatggtggttgtagtgggttgaaaggtggccccctaaaatgtatgtccacccctggaaactggggatgtgaccttttttggggaaagggtcttttctaatgtgattaagttaaggattgcaaaatgagagcatcctggatttgggtggaccctaaatcgaatgttatgtgtactgagaagagaagggagaagacagaggagaatgccagatgaagacagaaacagagattgaagttatgtggccataattcaaggattgctggcaacaccagaagccaagagaaagatgaggaagaattctcccctagacctttcagaaggagcgtggcccagccaacaccctgacttcagacttctggcctccagaactgtgagaataaattcttactgttgtaatccacctgatatgtggtaatgtgtacatttcagtgggttttagtatatatacagaattgtgcatccatcaccacaattttagaacattttcatcacccacaaaataaatcttaaacccagtagcagtcactccccctttcaccctccccataaacccctggtaaccattaatctactttgttttatggattttgctagtctggacatttcatataatctggcttctgtcactgaatattaggtttccaaggttcatggatattgtagcatgtatcagtacttcactgcttttcatggccgaataatattccactgaatgcatatatcacatatatcacattttgtttatctgctcattggttgataggcagtttgggatttcccaccttttggctataatgaataatggtgttgtgaacattccactgggaatggaattgttgagtcatatggtaacatttaaacttttcaggaactggccaggtgtggtggattgaacctgggaggtagaggttgcaatgagctgagattgcgccactgcactccagcctgggtgatggatcacacctgtaatcccagcactttgggaggccgaggtgggtggatcacaaggtcaggagttcgaaatcagcctgaccaacattgtgaaaccccacttctactaaaaatacaaaaattagctggtcgtggtgttgcgtacctgtaatcccagctactcaggaggctgaggcaggagaatcacttgaacccgggaggcagaggttgcagtgagccgagatcacgccattgcactccagcctgggcaacagagccagactccacctcaaaaaaaaaaaagtccttttcagggaccgccaagctgattcacaaagtggctacagcactttatagtcccaccagcactacattgtggttccagtttctccacatcctcaccatcacttgttattatgtcttttttgtttgtttttttccgacagagtctcactgtgtcccccagtctgaagtgcaatggtgcaatccagctcactgcaacctccctctctgagcttcaagtgattctcctgcctcagcctcccaagtagctgggattataggcacatgccaccacacccagctaatttttgtatttttgatagagacggggtttcaccatgttggccaggctggtctcgaatgcctgacttcaagtgatccgcccgccttggcttcccaaattgctgggattacaggcgtgaaccaacgcatctggacacatattatgtttctaaataggtgtgggtctctcattgaactgttatattctactgtcaaattgtctctccatgaataaataccacacagacctaatcaccctagcagcgtattaagatgtaataacttctagggcaagtcttcacccttttttcctcacattttcccccttctcctcctctcttcttcctcctccaagaaagccttgggtattcatagccctttattacttccatataaatgttataattagggcctggcacggtggctcatgcctgtaatcctagcactttgggaagccgaggcaggcagaccacctaaggtcaggagttcgagaccagcctggccaacatggtgaaaccccatctctactaaaaatacaaaattagccgggcatggtggcacgtgcctgtaatcccagctactctggaggctgaggcaggagaaccactgaacccaggaggcagaggttgcagtgagctgagatcgcaccattgcactccagcctgggcaaaaagcgcaaaactccatcaaaaaaaaatatatagatagatagatataaattaggttatcaatttcccccaaaatccctgctaggatattgattagaatgtaattgaatgtattttatatatattaaatctgtccccaggctgttccccaggctggagtacagtaatacaatcacagctcactgcagccttgacctcctcggctcaagtggattgtcccatcttggtctcctgagtggctgggactacaggtgtacatgaccatgacccattaacttttaagttttttgtagagacgggggtcttgttctgttgcccaggctagtgccaaatccccagcttcaggcaatcctcccacctcagcatagattttttttttttttttttttgagacagtcttgctctgtcacccaggctggagtacagtggcatcatctcggctcactgcaacctccacctgctgggttcaggcgattctcctgtctcagcctcccgagtagctgggactacaggcatgtgccaccaagcccagctaatttttgtatttttagtagagacagggttttgccatgttggccaggctggtctcgaactcctgacgtcaggcaatcccaccgccttggcctcccaaagtgctgggattacaggcatgagccaccgtgcccagcctagattttttttaagaacattcacgtttacaatatttaggagcaccttttcctcttgatttattaatgtcttacaataaaatattatcatcttattcagaaagcgtatgcacaaaattttaaattttatttttagcaaaaaaataggcgattttgctagtgtacatgggatccttttaaaattttgtgtttgttgttggtgtctagaaatacaattgacttttgtaaattgttcacacgtccagcagttttgctgaattcttgaattcatttcaatgatgtttctagatgttccatgggctttgctagcaaacactgccagtttgcccaccactttgccagcgtaaggcctgtgcccccagatatattcccagccttttggggaggagcggggagcccctgcaggctgtgcttctcagcctttgggtcattgcccgccgagctttacatttgtttacatttctttttaatgctaatggtatcatgtgtggtctgtaagtgtctatatgtgtagttttagtaagtcttaactttttataaaccagcagcctcctggccggggatagccaatagccccagcccactgaaagcctggtgagcagaaagggaagagaaacaagggtgttcattcactggtaggatgtgtttcctgaacggctcctgctcctgctggacaagcccacagagggcccagcttccaacaggtgagccttcatgccccaccactactttttatttgatttgattttatttttagacggagtttcactcttgttgcccaggctggagtgcaatggcgcaatctcgagtcactgcaacctctgccttctgagttcaagtgattctcctgcctcagcctcccgagtagctgggattacaggcaagcaccaccatgcccggctaattttgtatttttagtagagacggggtttctccgtgttggtcaggctggtctagaactcccaacctcaggtgatccgcccaccttggcctcccaaagttctgggattacaggtgtgggccacggcgcctggcctaattttttttttttttttttttattttataaagaggcagagtctcactattgcccaatctggtctcaaactccagggctcaagcaatcctcctgcctcagcctcctaaagtgcagaaattacaggcatgagccaccacatctggacccagcctctacttgttactgcaatatgcaatttggagcgacttaactgctcacgaggaaatgtctcgtgtcacacggcattttaagtagatacttagagcacttgagctcaccacagtagcaacaggaggtggttgtgaaagattccagtagtgaggtatgtgctaacattagttttatgcagttgtgattgaatactgcatctttacatttacgtttctctcaactgtgaatgctgccatgtgtggtctctgtttctgtataaaagttttaataaatttaccagcctggccaacatggtgaaaccctgtctctactaaaaatacaaaacttagccgggcgtggtggcgtgtgcctgtaatccgagttactcgggaggctgaggcaggagaactgcttgagcccgggtagcagaggttgcagtgagtgagccaagatcgtgctactgcactccagcctgagtgacaaagcaagactccgtgtcaaaaaaaaaacaaaaacaaaaacaaaaaaagtttttataaattttaatattttatcatcaatttgagtatattttaggtagtaaatgataaaattagtatctacatatattttatgcattcatgacataccattttcttaatttttcagtatttctaggctatgtggttcatcctagttttgacaaattatttcattcctacaaaaaatttttcaatatatttgttgaaaaaagctacatataagtggacccacatagctcaaacccatctatgccctacaagtgtcaactgagcgaacatagatagatacatagagagctagatatagatataagtatctatattatgaatatcagccaggcacagtggctcacccctgtaatctcagcactttgggaggccaaggccggtgtactacttgagctcaacagttccagaccagcctaggcaacatggtgaaaccctgtctctacaaaaaatacaaaaattagccaggtgtggtactgtgcacctgtagtcccagctacttgagaggctgaagtaggagaatcacctgagcctgagaaagtcaaggatgcagtgagccgagatagagccactgcactccagcctgggtgacagagtgagaccctgtctccaataaataaataaatcaataaatatcatacatatgtgtttcctattggtttttttttttctggaaaaccctatctatcacactggccaaattttgaagtatttgagctcacaataaatatacagtataaaggtttataattttttttttttttttttagagacagagtcttgctctgtcacccaggatggagtgcagtagagtgatctcagctcactgcaacctctgcctcctggattcaagcaattctcctgcctctgcctcccgagtagctgggattacaggtgcccaccaccacacccagctaatttttgttgtatttttagtagcgacagggtttcaccacgttggccaggctggtctcgaactccatacctcaggtgatctgcccgccttggcctcccaaagtgctgagactacaggcatgagccactatgcccagcctctaaatttatctttgattgcatctgatctttatttaatctagggttcaatctatatatatatagattgaaattgttcaagcaattctcctgcctcagcctcccgagtagctgagattacaggtatatgccaccatgcccagctaatttttgtatttttagtagagacggggtttcaccatgttggccaggctggtctcaaactcctgacctcagaagatccgccaacctcggcctcccaaagtgctgcgattacagacttgagccactgcgcctggccaatttttggttttttaaaacttgagatgtcctgaaacacaggaagtatatgtgttttttaacttcaaacttaagtaagaataggccttgagacatttttccccactcaaaacccaggctggctctacacatttccttgctagcagattgctttgcccagggtcacccatcactgacatgtagccctgcaagggtggcaacttcctctggcgatttccagcccactcccaagtgttctagccccaaggtctcatgttctctgaagtctgttacaccagagctctggctgctgagaccagtgcatgcttccagggtggcactgctgcctgtgatttcttgctacttctctgttttttttggatccctagagatatcctttacttgattatatggtcatttgaaattatgcctgtaaccttttacccagaattactacatgatttggagcccaagggttttccataactttttttctttttaattcgagaaggagtttcgttctgctgcccagtctggagtgcattggcaccatctcagctcactgcaacctcggcctcctgggttcacagctcccggccagttttccataatatctagtgaccaaatattgccagaaatagaacttattacttgtgttttaaaacacaattttaggcccatgtgcaatggcttgtgcctgtaacctagtgctttaggaggccgaggtgggaagattgcttgagccctggagtttgaaactgtagtgagctataaccaagccactgcactccagcctgggtgacagagtaagaacctaaaagaaaaaaatatatatattatatataccagaatacagagctgaggcatgcatgcgaatggtgtgatatttgagtatttttattttcctctttggcccaaacaccttggagttaaatgttcagagtatggatccaagtgatcctgttgtaatccagttatcctaaaaagaagttcggccaggcacggtggctcacgactgtaaatcccagcactttaggaggccgaggtgggggatcacaaggtcaagagttcgagaccagcttgaccaacatggtgaaaccctgtctctactaaaaatacaaaaaaattagctgggcatggtggcacacgcctgtaatcccagctactcgggaggttgaatcagaagaatctcttgaacccaggaggcggaggtttcagtgagccaagatcgcgccactgcactccagcctgggcagcagagcgagactccgtctcaaaaaaaagaagtttaactgacccttgggagacacaagggggagcctctagtagttcaggtagaactttgtgtgatctacaaagaaaggaatataaacaaacatacacttttaaggttttgtgttaaaatgctgggtactacttgctagagctacaggcagagttgatggtgcccacagaaagactctgggcagagagttaactggaggaacagcctctgctgtcggaaaaatctagtctactattttctagctgattggaaaatacaataatgtatttggcctctgctttttttattttaatgcagcaccttatatttgcttcttgcacttggccctgtcctttctctttggccaaacacagtttaggccacagttacctcccaaccaggctgcataggcttcccagccttcctgctccctctagtcttaggcactggcctcacacatggttgccctagttacctttcgaggccctaatcacttccttcaaaaaccatcaagatggctaagcatagtggctcatggctgtaatcccagcactttgggaggccgatgcaggcagatcacttgaggtcaagagttacaaaccagcctgaccaacatggtgaaacactatctctactaaaaatacaaaaattagatgggcatggtggcggcgcctgtaatcccagctactggggaggctgaggcaagagaatcacttgaacccaggaggcggaggttgcagtaagccgagattgcccctgcgccactgcactctagcctgggcaacagagtgagattctgtctcaaaaaaaaaaaaaaaatcaagatggttcatgccccctcaaccataggtaccccacctttaccaacctggccggtgaccacgccagaggaggtcttttctttttgtttcttcttgagtgttgcaactccagcaagatgtcaacatctgccgcatgtgcccgctggtggtggtgtggaagtggggagctccaggtccatgaaggagggtgacgtggatcttccaattccagatcaggatccccaaatttgttactaagctgtgaattattaagcacacctcacaaaggcgagcatgaccttttccctggacacaacagaatgagcctagtggtgaagaaaaaaaaaatctggccgggtgtagtggctcacgcctgtaaccccagcactttgggaggccgaggcgggcgatcatttgaggtcaggagttcgagaccagtctggccaacatggtgaaaccccgtcgctactaaaaatacaaaaattagccgggcgtggtggctcatgcctgttgtcccagctactcaggaggctgagggaggagaatcgcttgaacctaggaagtggagcttgcagtgagcctagattgtgccactgtactccagcctgggcaacagagcaagactctgtctcaaaaaaaaaaatttaggccaggcacagtggctcacacctgtaatcccagggctttgggaggccgagacgggtggatcacgaggtcaggagatggagaccatcctggctaacacggtgaaaccctgtctctactaaaaattacaaaaatttagccgggcgtggtggcgggtgcctgtagtcccagctactcgggaggctgaggcaagagaatggcgtgaacccgggaggcggagcttgcaatgagccaagatggcgccactgcacgccagcctgggctacagagcaagactccgtctcaaaaaaaaaaaaaaaatttaaacaaaaaaaaaatcttttggcatttttttttctccctttagggacaaaggatcccttctcatgattatcctaagatctaaggttattctttttgcctcccagggtggatggtggcagatgcccttgcatttacttgatagcagactcctctttgataaaggcctttgataaaggcctcattccgccagtttatcttgccacctcaatgaatcgctagctgtgtcaggaatccctacacaatccatttaaatgactgtggcagggcctcttcccctgtggaagctgaaggtggcacgtccatctccgatgaaatgcgaatggggctctgggcacgcggcggaaggcagagaagaggcagagaaagaagctaataactaattacaccgactccacaattacgactaacgttggggacgaactctttgctaaataaacatttaggtgaaacaaagcttccatttccaatcggcctaactctggtattagcgttggcaggggccatgcaggaggggcagtgagcagtggtggccgcgttgccgacagagggtgagggagctgggcgcgtggtgtgggcgccgaggtcccgagctgaagagctttaaaacctctcaaaacacagaactatcaatcaagtaggaccagactgtgcccccagggaaggtcgcagatttaaggctgcgaggacaagggcaaagaagtgcgaagcgttcgggtggacatgcaagccggcccagcgcagacgcctgagaggggtgcccagcagcccccgcaggtctccgccgcgcccccgccacagcgcccaggcgcccgcagggcacagggatcggcaccagccggtgacgtgtccctcacgctgctgcctgtgattggtggtcccgatccggggcgtggccccaagggaggcacttagccctactggggatgcgcgcgcagacccacggcctctgctccgcccccagctggcctgtaattggcgcagtcggcccaaggggcggctgttcaggcgcgggtgcgcgcgcagctgctgtggccctgcttggtgcgcccgctgtcaccgccatggctgccccgtgtttgctgcggcaaggacgagccggggcgctgaaggtaaaggaggagccagcctgggctggctgcgcggccccgagcctacgtaggggatggggtgagggggcgcggtgctggtcaggtccgggcctgtccgcgacctctagccgtcctagttgggccgctgaccccgctccctgggcccaggactgaccgccacggggccaggcccggatgtggccagcgagcgtcccgcggttcccccgagccggtccgccgccgccgctgcccgaggcccaggccgaggctggcgtgccccgtgccgacgggcgctcccgagggctgcatgcctgggcggcagactcgggtggacgttcccaggtgatgctgccgcgcggctggggtcagccgctgtgcggctcccgcacggcttctctgaaggacagtgacttctccatttagccaagagaggaaatgagggaactttcagggacctggttaacttggtaacttactgacagccgttgagaagccagctgacatgacctgacctgtgaaaaggagaagaagggctttcttttcggcaaataaaaagctaaggccaaggccgggcgcggacactttgggattttgcctgtaatcccagtactttggaaggccgagccaggcggatcgcttgagttcaggagttcgagactagcctggccaacatgtcgaaaccccgtctctaaaaaatacaaaaaattagtctggcgtggtggtgcattcctgtaatcccagctactcgggaggctgaggtgggaggatcccatgaacccgggacgcggaggttgcagtgagccgagatcataccactgcactccagcctgggggacagaataaataaataaataaaataaggctaagaccacttcactctcttacaaattttaaaatggctgttattacaaaagcagtaactattccctgcagaatatatatgcgtgtgtgtatatatatatataaatacatattatatatattatatataaatatatattatatatatatttatataatatgtaaatatatattatatatttatataatatataatatattatataaatatatattatataatatatataatatgtttatataaatatatattatatatttatatatttatataatatataatatatatttatatattatatataatatatatcataatataatatataatatatatatatttttttttgagacagagcctcactctgttgcccaggcccaggctggagtgcaatggcaccatctcaactccctgcaacttctgccccctgggattaagcgactctcgtgcctcagcctgcagaataatttaaaagtacagatagggaaattcattgacagtctaccattactccttcaagcatctagttcctaacgatttctatcagcttttatatgttcacataagcacatgtactcatgcttacaatcatgaacatacacgttttcatgtttatatgtgcacatacaggcacctctgttctgtatccagcatctagaacattgtactgtctagcacttaataggccttagtgagtatatgctgagtgagttggcataatataaaatatcacatttatattgtagacacttttgaagcagtttttatatacctacatcattttagtggccagatagtatttcttctactctattttctaaggataagaaaacattttacagaaagaaacatagggcctggcaggtggctcatgcctgtaatcccagtactttgggaggccaagacaggtggatcatttgaggtcaggcattcgagaccaacatggtgaaaccccatctctactaaaaatacaagaagagccaagcgcggtagctcacacctgtaatgccagtactttgagaagccaaggtgggtggataacctgaggccaggaactcgagaccaacctgatcaacatggtgaaaccccgtctctactaaatacaaaaacttggccgggcatggtgatgcatgcctgtaatcccagctacttgggtggctgagacaggagaattgcttgaacccacgaggcggagattgtagtgagccgaggttgcgccactgtgctccagccagggtgacagagcaagactccatctcaaaaaacaaaatacaaaaacattagccaggtgcggtggtgcacacctgtaattccagctacttgggaggctgaggcaagagaatcgctggaacccaggaggcggaggttgcagtgagccaagattgagccactgcactccagcctgggagtcagagtgagaccctgtctccaaaaaaaaaaaaaagaaaagaaaaaagaagaaacgtggtattttgtaggttaataaataattggagactacaaaaaaaatgcactggagaacgtctggttgaagttttattaaaccaaatattaatagtgattgtccttgaactcgggtgttttcttcttgcagcctttttgtattttacaaaatgtccataatatacatacattatgaaaactgtaataaccattagaagtataccatgtgaatgttttgcacttacatgtagtggtaatatgtaatattcatatgcacggtacctacatgcacacaatcccagcactttggttgtttttcttttttttttttttttcctgagacagtctcactctgttgtccaggctggagtgcagtggcgtgatctcagctcactgcaacctccacctcctgagtctaagcaattctcctgcctcagcctctgcagtacctggaactacaggcatgcaccaccgtgcctggctaaatttttttttttttttttttttttgcgacagagtcttgctctgtcgcccaggctagagtgcagtggcacgatcttggctcactgcaagcttcacctcctgggtccacgccattctcctgcctcagcctcccaagtagctgggactacaggcacccgccaccatgcccggctaattttttgtatttttagtagagacggggtttcaccgtgttagccaggatagtctcgatctcctgacctcatgatccacacgcctcggcctcccaaagtgctaggattacagtcgcaccgcgcccggccttttttttgtatttttagtagagacggggttgtccaggctggtctcagaactcctgacctcaagtgatccgcccacctcagcctcccaaagtgctgggattataggtgtaagccaccgcacctggccaatcccagcacttcaggaggccggggcttcaggatcgcttgaggccaggagtttgaggaagccaggagtttgagaccaacctgggccacgtagccagatctcgtctctataaaaaataaaaaatattagccaggcatggtagtatgtgcctgtagtcctggctatgtcagagtatcgcttggacccaggagttgaaggctgcagtgagccatgattgtgccactgcactccagcctggacgactgagagagacccctgactcaaaaaatatatatatatattcatatatagtaccagctattataatggcattactctaaacatccatattcattaattcttttgtcagactatgctccaggaagcccaggtgtttcgaggacttgcttctacggtttctttgtctgcggaatcagggaagagtgaaaagggtcagccacagaattccaagaagcaaagtccaccaaaaagtaagattttgatggtagtcataagggaaagagaatgcaaaaagaaaatagattagtcagccttcgaagcacgacagtgagttttactagctacgtaatttatgcttcttccttttcagcagtgtccagattatacaagacacaagatctataacagattttagaccaaacatttcagtcatgtcgtagtctttgactgaatatttagccctgaaatggtttttcctgtattttctaaatgccaaaccccaacctgaagtgagtgatgccttggtaaaggctctgtggcatttagatggccccggcacagtgagcttgccagaaagccaccttactttccatcctctgatgctgagttgtttgttttgttttgttttgttttgttttgttttgtttcagtctctttgagacccatctgtggttttccaggctttgcttaatcccagtccaggactagctgggactacaggcatgtgccaccacgtctggctaattttttgtatttttagtagagacagggtttcacaatgttagccaggatggtctcaatctcctgaccttgttatccacccgcctcggcctcccaaagtgttgggattacaggcgtgagccactgcgcccggcctaaatctttaattcttttttttgagatggagtcctgctctgttgcccctgctggagtgcagtggcgcaatctcggctcactacaacctccgcctcctgggttcacaccattctcctgcctcggcctcctgagtagctgggactacaggcgcccaccaccatgcccagctaattttttacatttttagtagaggtggggtttcaccatgttagccgggatggtcttgatctcctgaccttgtgatccgcccgccttggcctcccagagtgctggaattacaggcgtgagccaccgtgcccagtcctaaatctttaatcattatatggggttgtagaatagtaattgagtttggtcttattttcatcaatatactatttcctcagtttgaatgtttgaaagtatttagattcttttgttttcttcctccttggtctgtgcacagaacactggtaagtttttaaatatttgtatttatacaaagagagtgccagcccctgactgcctctcacagtgtgtggacttgaggcttggattccacgggaatgttatttagttttgtgctatgactcctgcctcgtttttcaatcattgtttttttctcttcttccttttatgttatttgttttaagagaggggctctggctctctctcccaggctggagtgcagtggcacagtcatagctcactacagcctcaaactcctgagctcaagcaatcctcccacctcagcctcctgagtagctgagactacaggcacataccaccactcctggcatatccctggcatgttttgttgatgttgttgtttattttttgaaatagagtcttgctctgtcacccaggctgtagtacagaggcacaatcataggtcactgcagcctcgaccttccaagctcaagtgatcctcccacctcagcccctggagtagccaggactacaggtgcacaccatcacaccctggctaatattttaattttccatacagatgaagtctcactgtattgcctagactggtcttgaattcctgggctcaagcaatctccctgcctcaaactcccatagtattgggattacaggtgtgagccactgtgtccagcctacctggcatgtttttgacattctctaaatgtttactgatgaacaattagttgaatttcattgctaacattatcctctcctttggtgaattttagtctgtgtctgcaatcctacatcatagacttatgaatttggattaaatggattttaaaatatcatggcagagccaaagagccccctttttagatacatgcgtctgtgtgtgagtggaaacggagtgcttcattctgtggccatctgggttgtggtttggggaggggaacactgacctgggagcgagccttgggctctcatggagctcctgcctctgtccttgacgggccctgcaggcctctgagcctcggttcctttgtgcttaagcaggatgatcatgccagccttgctgggtggttgtgagactggctgcagtgggatacacgtagctactgcacacactgcagagagctttcaggtgggaggacagttttcagaactaagctcatcaatacacagaacagttgtatcttgtttttttttgagacagagttttgctctttatgcccaggctggagtgcaatggcgtgatctcagctcaccacaacctctccgcctccctgattcaagcaattctcctgcctcagcctcccaagtaactgggattacaggcatgcaccaccacgcctggctaattttttgtttttttgttttgtttttgcgataaagtctcactctgtcgccaggctagagtgcagtggcacgatctcggctcactgcaacctccgcctcctgggttcaagccattctcctgccccatcctcccgaatagctgggactacaggtgcccgccaccaaacccggcaaatttttctgtttttagtagagacggggtttcaccatgttggccaggttggtctccatctcttgacctcgtgatccgtccgccttggcctcccaaagtgctgggattacaggcgtgagccactgcacccagccaattttttgtattttttagtagagacagggtttctgcatgttggccaggctggttttgaactcccgacctcagatgatcctcctgcctcaacctcccaaagttgctgggattacaggcatgagccaccgcacctggccatgtatctcataatttttaaaagaattcctgtacaggctgggcgtgggggttcacgcctataatcccagaactttgggaagctgaggcgggaggatcagttgagttcagcagtttgagacaagcctgagcaacatagtgaaaacctatctctagaaaaaactttaaaaagtagctgggtatggtagcgtgcacctgtggtcctagttactcaggaggctgagacgagaggatcatttgagcccaggaggtcgaggttgtagtgaattatgattgcaccactgctgcactccatcctgggtgatagagtgagaccctgtctcgacaaaaataaatactgagtctgggtatggtggctcacacctgtaatcccagcacttttgcaggccaaggcgggccgatcacttgaggtcaggagttcgagaacagcctggccaatatggtgaaacccctgtctctactaaaaatacaaaaattagctgggcatggtggcggacgcctgtaatcccagtcgctcaggaggctgaggcaggagaatcgcttggacccaggaggcagaggttgcaatgagctgagattgtgccattgcactgcttcttgggtgtcacagcgacactccatctcaaaacaaacaaacaaaaaatccctgtacaaagaaaaataaataatgcttgtaaatggatacgtgcaggcccatattttcccctgaagtgttggtagttggtaagtgtaagatacagaggaacttttcaccctccatggcacattgccagatcaaacctttctcagccagaagtggctttggaagctctaacagaagtttcctgcatgcaagtgaggtacccaaagctctcatccttggagtcacatctctagtcagagtgtctgccacaggacaagaccctggcgcgatgggacatgctgtgccttatttcatcagaggtgtccagctttccccagcacatgcgttctccctgaggaaggctgccggcacagatatcaggggctggatgttcttggaggtgcaccttggggaaccgctgggctctctagcttgctgtttccttgaatccagtacccaggcctaattttgcaacagtcagtaataaattgttgactgagtaatttctgtgtagctttttgaagagtatgtccagaagccacagttaattatccatttgaagtccttgtttcagttttaaaagtaaggaatatctggaaatagaaatttcacgtaatttctatttacacacagtgtaaatagtggctcagtaaaaaaataggcacagtggctcacttctgtaatcccagcactttgggaggctgaggtgggtggatcacctgaggtcaggagttcgagaccagcctgaccaacattgtgaaaacctgtatctactaaaaatacaaaaaaaaattagccgggcgtggtggtgcatgcttgtagtcccagctactcgggaggctgaggcaggagaatcacttgaacccaggaggtggaggttgcagtgagccaagatcacgccattgcactctagcctgacccaaaagagtgaaactccatctcaaaaaaaaattacccaggcgtggtggcacacaactgtagtaccagctactcgggaggctgaggcaggaagatcacttgagcccaggaggcggaggtttcactgagccgagatttgcaccactgcactccagcctgggtgactgagctagactccatctcaaaaaaaaaaaaaagaaaacgaaattttacgtatcaaattataacaagcagtgccaggcactgttctaagcactcttcccatatctcatcttccccagtcctcaacaacccagggagtagatgctactgctatccccatgtcatagacaaggaagttgaggtctggagggactgacctgcctgagtcatgcagtgtccacacaggtgtcagcggagaagcctggatttgaacccaggcattctggcagtgcggtttatattttaatcactgtgctgtcttccttctgaaaattcttgattctcatgtgtttatttaaaaataaaatgccgggcacggtggctcacgcctgtaatcccagcactttgggaggccaaggcgggcagatcacctgaggtcgggagttcgagtccagcctgaccaacatggagaaaccctgtctctactaaaaatacaaaattagctgggtgtggtggcgcatgcctgtaatcccagctattcgggaggctgaggcagcagaattgcttgaacctgggaggcagaggttgcggtgactggagatcgtgccattgcactccagcctgggcaacaagagtgaaactccatttcaaaagaagaattagataaataaataaataaaataagtaaaaataaaaaaaaactttttatagtgaaacacttgtagaggtttccattaccatataaaatttgagtaactttattctctaatgtaatgtttaaatgcacctctgtttctgaatgtgccttgtttccaaagttagttttgtgatattttgacaagatgtgcaagtattttaaggttgctaatctatgtttcacaccctaaccctttttacttttgatagggggatcactaaaaacttgaaggccatgccctcacttttcaactaagcagaaaagagattcaggaaatttgagttctattttgaggtgacagggaagcaacaaggcgaattcctgctttcactaattactagtacagtatttgtaaacctttattttacatagtttgttatggtctctgagagaagagaaacagtctctgaaagtccccatctcaggctgtgagataggcctacacagctagtcttaggtcggtagttttgtgttttattatacagtcatccttcagtatctgaggggaattggttctaggccacccctcccaccaggattccaaaatgtgcagatgctcaagtctctgatatacagtgatgcagtatttgcatatcatctaagtacatcctcctgtatactttaaatcatctctagattacttataatacctcatacaatgtaaatgccatgtaaatagttgttgtattgtttagggaataatgtcaaggaaaaaagtttgttcatgttcagtactaaagcagatgattttctgaacattttccatcctcagttggttgcttggtgggtttctatgggacctgtcttaggatgattgcattgaagatactgtcagtaataagtaatgtgtcatgaaatgtctgtaattttgactgagttttaagttgttttgttaaataacattcctctttatgccgtttcccagatgtagtggaaccaaaggagaggggcaagctcctagccacccagacagcagctgaattgtctaaaaacttatcttcacccagttcttacccgccagctgtgaataagggcaggaaggtagctagtcccagtcccagtggcagcgtgctattcacagatgaaggggttccgaaatttttgtcaagaaagactttggtagagtttccacagaaagttctgtctccattcagaaaacagggctctgattcagaagctcgtcaggtgggtcggaaagtgacgtcgccttcgtcttcatcctcttccagctcctctgattctgaatctgatgatgaggctgacgtttcagaggtcactcctcgagtggtgagcaaaggcagaggggggcttcgaaaaccagaggcctctcattcctttgaaaacagagccccccgagttacagtatcagcaaaagagaaaaccttgctgcagaagccgcatgtggacattactgatccagagaagccccaccagccaaagaagaaagggtcccctgctaagccatcagaaggcagggaaaatgcgagaccaaaaaccacaatgcccagatctcaagtagatgaagagtttttgaagcaaagtttaaaggaaaaacaattgcagaaaacatttagattaaatgaaatagataaagaaagccaaaagccatttgaagttaaaggacccttacctgtccacacaaaatcagggttgtctgcgccaccgaagggcagcccagcgcctgctgtgttggcagaagaggccagagcagaggggcagctgcaagccagtcctcctggggcggcagaggggcatctggaaaaacccgtgccagagccccagcgcaaggcggcccctcccctgcccagaaaggaaacctcagggacgcagggaatagaaggccacctgaagggtggacaggcaatcgtggaagatcagataccaccaagcaatttggagacagttcctgttgagaataaccacggtttccatgaaaagacagcagcgctgaagcttgaggccgagggcgaggccatggaagatgcagccgcgccaggggacgaccgaggcggcacacagggtataccttgactcgcgctcccaagtgcaccctgtcccttagggtagtgaggcaaaagaactaatttacatatgcttgtagagcagtgttacaattagtcaaattctgtactagaaatatggcctgtaacgctgtctcagccaggcagaaaagtatgtcttaattatggacaatccacatctttatatttagaatccctaaaatatttaacgttcttttttttttttttttttgagatggtgtcttgctctgttgcccaggtagagtgcagtggcgcgatctctgctcactacaacttccatctcaagcacttcccctgcctcagcctcccaagtagctgagattacaggcgcaggccaccacacctggctaattttttttgtatttttagtagagatggggtttcaccgtgttggccaggctggcctcgaactcctgacctcaggcaattcacccgcctcggcctcccaaagtgctgggattacaggcatgagcaaccccaccctgcttaaccttcatctttttttttttttgagacagagtcttgctccatctccaggctggagtgtaatggtgcaatcttggctcactgcaacctctgcctcccaggttcaagccattctcctgcctcagcctcctgagtagctgggattacagtcccccaccaccatgtccagctaatttttgtatttttagtagagacggggtttcaccatgttggccaggatggtctcaatctcctgacctcatgatcagcctgcctcggcctcccaaagtgctgggattacaggcctgagccaccgtgcccggcccccaaccttcatcttaaagagtatgtccttggcactcttcactatttcttaaccggtataatttttgaaaactggcagcttaacattgtcaccactgacttttgaaggtgtccaagtgttcattgatgaccttgtggggcatctcgctaagtgaaaaggggagcctccggtttaacttgcataggtgaagagcagtagctagtcgcttggcgtgagagtctttgggtaaactagatgattgctttcagcatcctgtgcacagggcagattcatagttcaggaattaaagcagtaagtgttgtacaggtcagccgctgcatacgcatcctttcccctggacagcgtttccttctctggttaactgaaaacacatgtgggctgctttactcttctagaagacattttatgaagggttttttgtttgtttgtttgtttgtttgtttttgacatgggttttgctcttgttgcccaggctggagtacaatggcgcaatcttggctcactgtaacctccgcctcctgggttcaagtgattctccagcctcagcctccaaagtagctgggattacaggcgtgtggcaccacccccggctaatttttgtatttttagtagagacagggttttaccatgtaggccaggctggtctcgaactcctgaccttaggtgatccacctgcctcggcctcccaaagtgctgggattacaggcatgagccaccgtgcctagcgtgtggaggcttttaaagggcaacagtatttattcctatgatgttaccatttttttttttttttttggagatggaatctcactctgtcacccaggctgcagtacagtggcgcaatcttggctcactgccggctccacctcccacgtacaaacgattctcctgcctcagcctcctgagtaggtgccactacaggtgcctgccaccacgcctggctaattattgtatttttagtagagacagcgttttgccatgttggtcaggttggtctcgaactcctgaccgcgggtgatccacctgcctctgcctcccaaagtgctgggatttcaggcgtgagccactgcgcccagctatgttaccattttcttgagcacgaaacttgataagatgcaatgcgctttaggtgggtcgtggcaaacatgaaaaggcaagcttccgttttagaatccatggctcttcttgaagacttctctaaagtgcatgatccctaacaagcgcggctccgtcctgtgtctgctctccatcctctgtaccgccgccccttgccttatgtgccttacatgacgccttcttgttcttggttcgttgtgcgacaggatctatgtgttttcccccctctccgtctgctctttgatcagtacgccaagtgccggtgcttgccagacttcccagcccttaggaactgcatttcctgatgctgctgctttcactcctcctgctcgaaaatggagacgaataacacaactcgcaggataaaaacagaattgggagttttcagactgcaaacctttctgaagagaaagttctaatatttcacgggtgtgttgtttcttaactatcttctgtgcgcatgcgcagagcccaccttgcagagccgtgtctgtatggggccgcggtctcactaggcagtccgtgccccagtactggccttccaggtagagtggttttagatcagagttttgtaacccacgtcttggtcagttatcaccctccctatagtaactaaaatagtacgttctgctttgaaggtgtccctacaccacaccgaagatactcaccttgtggagattggaaggatgccagctctttaaatgagacatcgtttttgcttaacgtaacttaaaaatgaaaaacagagcttttgatattaattgaaatagtgagaaaataaatgtatttaggttatttttttgtggagcatgaatggaagttaagacagacctaatgacctgatttacagaaattgagtcagtacaaatcttaacccaaatatcagcctgtgttcccgtgctggttttgattttgccattatgttatattgtgtgtcctgctgcaggagaccagtacttcttttgcctcaacccctacttgtagtttcgaattaccaaatgtttaaatgctgtgttgttgttattagaatttatctaattttcttgtatcagagattcagaaggctcctttagtttaagcttttcaaaaaaaattttttatttgacagacgtgctctgtcccacaggctggagtgcagtgatgtgatctcagctcactgcaacctccacctcccagtctcaagcaatcctcccacctcagcctcctgagtagctggagactacaggtgtgccaccatgccctactaatttttttttttttttttttttgagacagagtctaactttgtcaccaggctggagtgcagtgatgcagtctcaggtcattgcaatctctgcctcctgggttcaagcaattcttgtgcctcagcctcctgacatagctgggattacaggagtatgccaccacacctgctaacttttgtaactttagtggagacagggtttcaccttgttggccaggctgctctcaaactcctggcctcaagcaatctgcccgcctcagcctctcaaagtgctaggattacaggtgtgagccactgctactggcccctgctaattttttattctttgtagagacagagtctcactattttgcccagaatgatctagaactcctgagctcaagcaatcctcccacctcggcctcccaaagtgctgggattatgggcgtaagccaccatgcccagcccagatttctaatagaggtagattttatcatgcatctctaagttacctgaaagtcctgctataattgttctaggcattttcaaacttttgagaagcctagaagtatacaaactaagatgttaagacacgttgtatggcctggcatggtggctcacgcctgtaatcccagcactttgggaggtcgaggcgggcagatcacttgagctcaggaaatcgaaaccaccctggccaacatggtgaaaccccgtctctactaaaaatacaaaaattagccaggcgtggtggcagacgcctgtaatcccagctacttgggagactgaggcaggagaatcacttgaagctgggaggtggaggtttgcagtgagctgagatcgcaccgctgcactccagcctagacaacagagtgagactccatctcaaaaaaaaaaacgcattgtaataactattccatttcttaaattggaaggctgtatgttttagaataaacttccaagtaatatctttctttttctttactgtggcttttgtaggcttttcttttttaattagacaatttgttcctcacagatagggttgatgaagaacgcttggtaggtaagcacctgtgtgtgagccgagtcattcataaagaactgttcacagataggttgatgaagaatgcttggtaggtaagcgcctgtgtgtgagccgagtcattcataaagagctgttcacagatagggttgatgaagaatgcttggtaggtaagcacctgtgtgtgagccgagtcattcataaagagctgttcacagatagggttgatgaagaatgcttggtaggtaagcgcctgtatgtgagccaagtcattcataaagagctgttcacagatagggatgatgaagaatgcttggtaggtaagcgcctgtgtgtgagccgagtcattcataaagagctgtccttgtgttggtctcatgggcatcgtgtttcctccgcagagccagccccagtgcctgctgagccgtttgacaacactacctacaagaacctgcagcatcatgactacagcacgtacaccttcttagacctcaacctcgaactctcaaaattcaggatgcctcagccctcctcaggccgggagtcacctcgacactgagggccctcggtgtgaagatgaaccttccaccgtcttcactgcatcctggagtgcaaaaataaaatccactcaagagtcacaaggcccgctgtgcataatcggtttcacttttacctttttttttttttttttttttttgagacagggtctcactctgtcacccaggctggagtgcagtggcacattctcggctcactgcaacttccgcctcctgggttcaagtgattctcccacctcagcctcccaagtaggtgggattacaggtactcaccaccaggtccagctaacttttgtatttttagtagagacagggtttcaccatgttggccaggctggtctcgaactcctgacctcagatggtctgcccacctccgcctcccaaagtgctgggattacaggcgtgagccactgcgcccggccactttcacactttttacagtgagtggtgaattagcaacagtaacactgattatccaacatatattttggaatatctactatgtgcaaggaatttttcttaaactctaaggttatgaatcactgggcaaatccatataattagagaattttaagtgctttagagcggtgtgattctactgtgctcagcctagtcaatttcgcattaaactgattatcagctgagtatcaataatgtaatagtgacttcttttattttttttgagatggagtctctgtttcccaggctggagtccagcggcacaatctaaactcactgcaacctccgcctcctgggttcaagtgattctcctgccttacttagcctcttgagtagctggtactacaggctcacgccaccatgcctggctaattttttttgtatttttagtagagatggggtttcaccatcttggccaggctggtcttaaactcctgacctcatgatctacctgcctcagcctcccaaaatgctggcattataggcgtgagccactgcacccagccagtaatagtgacttctaatcctacagccctggtttttgatcattagaaacaggagttttggccaggtgcagtggataattcctgtaatcccagcgctttgggagggcgaggcgggtggagcacctgaggtcaggagttgagaccggcctggccaacatagtgaaaccccatctctactaaaaatacaaaaatcagccaggcatgctagtgggtacctgtaatcccagctactcaggaagctgaggcaggagaatcatttgaacctgggaggcggaggttgcagtgagcaagatcgtgccattgtactccagcctgggcaacaggagtgaaactcaatcaaaaaaaaggaacaggaatgttactaattttaactactgcattgcaaacaaattgtattgcagtattttaccatcagaaaaggaagggaattgttttgtttgcctctgttagatattttatataaacttgaggacattttcattggtgagattcggaagaggtgaagtttcttgcagtacagggacgaagtaggaagaggtgaagtttcgtgcagtacagggacggagtaggaagaggtgaagtttcgtgcagtacagggacggagtaggaagaggtgaagtttcgtgcggtgcagggacggagtaggaagaggtgaagtttcgtgcggtgcagggacggagtaggaagaggtgaagtttcgtgcggtgcagggacggagtaggaagaggtgaagttttgtgcggtgcagggacgaagttgctccccgctggccacaggcactcaatgagctattttacctatttagggtttctgggttggccaagtaacctcccatcccttgtgatagataactttaagtcacacctttgggggcaatgtggggggctcctgtgcatcacatggagcacgctcccccagcactctgcagagacagacccccagtctgacttagagaaagtaaccaatgtaggtgagggccagggcacggtggcttacgcctgtaatcccagcactttgggaagccaaggcggatggatcacttgaggtcaggagtttgagaccagcctggccaacatggtgaaaccctgtgtctactaaaaatacaaaaattagccaactgtggtggtgcgtgcctgtaatcccagctattcaagaggctgaggcaggagaatcgcttgaacccgggaggcggggtttgcagtaagccgagatcatgccattgcattcagtctgggtgacagcgtgagactgcatctcaaaaaaaaatttttttttttaaatatcaaaattgaaaactagtattgtggtcatctgcctcaaattgtgttaccacacgggagacttagcaactcagccagattcttctaaacacattttttataataaaagtggtaaaactacattaccaaaaagaaaatagtaaacttacctaaaatccactatgctaacccaccctttttttttttttttttttttttttttttttgagacagcctcactcttgcccggaggagtggtgcgatctcagctcactgcagcctcgtcctcccaggcccaagcaatcctcccatctcagcccactttgtagctgggactgtaggcactggccaccatgtccgcctaatttttctattttttgtagagacagggttcaagagatctgcctgcctcggccccagaaagttctgggattgcaggcgtgagcccccattcccagccattaacatcttacaggattccccagtggtggtggtaggtgtaaccattttaatgtacctacaacttttctatcctgctatttgcattttttggtttttcatttaatagttctcaagctgggatccgtggaactactgtgatgggcggtgatgctttggaaatggaaattcccttaatattaaaatgaacatgaatatattttgatttgcatatatttttaagataaagcatgagacttgtataaagttctttcctggctgggcgcggtggctcatgcctgtaatccctgcactttggaaggctgaggcagatggatcacctgaggttgggagtttgagaccagcctgactaacatggtgaaaccccctctctactaaaattacaaaattagccgggcgtgttggtgcatgcctgtaatcccagctactcaagaggctgaggcaggaaaatcacttgaacccaggaggcagaggctgcagtgagtggagattgcagcatcgcactacagcctgggcaacaacagcaaaactccgtctcaaaaaaataaagttcttcccttagaactagtcctgttgggctagtctttctgggattttggtttactctcctccacccattggaagggcttaaaaccgaatagccagcaccaagcacagctctgcattttgtagctatcactgcagatgatttcttgatagtccatctggtggcaatacagtggtcacccaaggggccattgtttgggtctatgtgatttcccacgttctgttggaggccgggcgcagtgcctcacgcctgtaatcccagcactttgggaggctgaggtgggcagatcacgaggtcaggagatcgagaccgtcctggctaacacggtgaaaccctgtctctactaaaaatacaaaaaattggccaggtgcggtggctcacgcctgtaatcccagcactttgggaggctgaggtgggcagatctcgaggtcaggagatcgagaccatcctggataacacggtgaaaccccgtctctattaaaaatacaaaaaattagccgggcatggtagcgggcgcctgtagtcccagctacttgggaggctgaggcaggagaatggcgtgaacccaggaggcggagcttgcagtgaaccgagatagcctcactgcactccagcctgggcgaaagagcaagactccgtctcaaaaaaaaaaaacaaaaaaaaaattagccgggcgtggtggtgggcgcctgtagtcccagctactcgggaggctgagacaggagaatgatgtgaacccgggaggcagagcttgcagtgagccgagattgtgccactgcactccagcctgggcgacagagcaagactccgtctcaaaaaataaattaattaattaaattaaataagtgggtgttttaagtgctcagcttccttggttctaccaccttctctccctgaccctccttccctttccccctgaccttggcctttattctagaacggatctgaagcaataggatataaaaaattcacaactgctaaaacagtgttccttctagtgtaattttcacccttagagacctgtctgtaataaacattatttgaaatgcctactatatgctaggcactatgcctcggccacgggttcagacgtgatcgagacagcctgccttctctgagtgtatggcctgggaaagggggcagctgagagacagatgcatggcgatgtgccggataacagacgtagaaggcagaggcaggggagctgtctggggagaggcaaagatggggattcatcagagaaggctttgaaggacatgatgcctaacctggatgtcgaaagggattttgccaggagcacagggcactggtggagggagccctgcggggcagtcctcaaggcctccggatgggtgtgagaggcaccggggctgaagcagcatctgggtttgaggaagccacagccccttggctctccactgcagtctcagagcagcctcaggctgagtaagtggctgaggccaatcctttaggaaacggcaccacgcctggctaatttttgtgtttatactagagtcaggatttcaccattttggtcaggctggtctcaaattcctggcttcaagctatctctccccctcagcctcccaaagtgcagggattacagcaggagccaccgtgctggcccatatatgccatctttcaactgcctgtattcagagactctcacctcctcaagcccttcgtgggaggaaaactagacagtgaaatccagccaaacaagagatgaactaacattaaaaattcaaaaattgggccaggcacggtggctcatgtttgtaatcccagcactttgggaagccgagacaggtggatcacctgaggtcaggagtttcagaccagcctggccaacatggcgaaacctcgtctctactaaaaatacaaaaattagctgggcatgatggcgggcgcctgtaatcccagctacttgggaggctatggcagtaaaatcgcttgaacctgggaggcagaagttgcagtgagccaagaccacgcccttgcactccagcctgggcaacaagagcgaaagtcatctcaaaaaaaaaaaaaagaaaaaaatcaagaattgaaggccacagtagtactgggggagaccttagaacctatttgcctgtgaattaaggctaaacaactatggagattacaagacagaatgagagtgttataaaccctaacaagtaaacagaagataaaccaagaacctggaggacacaaataggaacttgggaggtagcccaggagaactcctcagctcatccttcagagcaaatgagtcagtactgtgcggaatagacacttggcaggatggagatgagaaatgtaaaatagaaacttggaggccggacgtggtggcttacaccagtaatcccagcactgtgggaggccgaagtgggcagatcacctgcggttagaagttcgagaccagcctggccaacatggtgaaaccccatctctactaaaaacccaaaaattagccaggcatcatagcgctggcctataatctcagttacctgggagactgcggcaggagaattgcttgaacctgggaggcggaggttgcggtgagccaagatcatgccactgtactccagcctgggcaacagagtaagactccatctctaaataaataaataaaataaaataaaaagcaactcttggccaggcacattggctcatgcctggaatcgcagcactttgggaggctgacatgggagggtcacgagctcagatgttcgagacccgcctgggcaacatagtgagaccctgtctcaaaataaataaataaataaaaataaagaagcaactcttttagcattataagatagggcagaggaaaaaaagaaaaaagaaacaactcttcttaccaaaaaaggttgaaaatatcccttctgttgtccccgcccacaatgtcttaaacctagcaggtgctgacctaaaggaagaagcaggggtggccaggcgcgggggctcacgcctgtcattccagcactttaggaggccgggcgcagtggctcacgcctggaatcccagcacttcggtaggccgaggcgggcagatcacaaggtcaggagatcgaggccatcctggctaacacggtgaaaccctgtctctactaaaaatagaaaacattagctgggcatggtggcagatacctgtagtcccggctactcaggaggctgaggcaggagaatggcatgaacctgggaggtggagcttgcagtgagccgagatcacatcactgcattccagcctgggcaacagagcgagactctgtctcaaaaacagaaaacagaagcaggagcaaaactcgtgcaagtggagattctctgggccaagtttatggactgcaagccaggagcactgactcaaatggccccgaatatccatgctgtgattagctgcagttacaagtggcattttgttgttttgtttttgtttttttgagaaggggtctcactctgtcccggctggagctcagtgatattttgttgtttttctttttttgagaaggggtctcagtctgtcacccaggatggagtgcagtggctcgatctcgtctcattgcaagctccgcctcctgggttcaggcgattctcccacctcagcctccagagtagctaggacttcaggcgtgcaccactatgcccagctttttaaaaaattttttgtagagatggggtttcaccatgttacccaggctgctctcgaactcctggactcaagcaatctgcctgcctcagactcccaaagtgctgggattacaagcgtgatccactactccaggcctaaaagtgggtttggtttagtttgtttgttttttttgagacagagtctcgctctgtggcacaggttggagcgcagtggctcgatctcggctcactgcaacctccgcctccctgggtgttttgtattcttagtagagacagggtttcactatgttggtcaggctggtctcaaactcctgaccttgtgatccatctgcctcagcctcccaaagtactgggattacaggcatgagccaccgtgcccagcctagttttgttttcttgagacagcgtctcagtggtgtgacctctgctcactgcagcctctggctcctgagcttaagtgatcctcccatgttgcccatgtgaaagaaaaatattttgggccccaaaatcactaaggaaaagtcaagctggacactgcttaagggaaacctgcctcccattctattcaaagtcactcctctgctcactgagatagatgcatatctcattgcctcctttggaaaggctgatcagaaactcaaaagaatgcagcctccagtgtctcacctttctgtgcccagcaagctccctccccgcttggagtgttcctgcctttgcttcaagttgtcccacctttccagaagaaccaaggtgcttcttacatatattgattggtgtctcatatctccctaaaatgtataaaaccaagctgtggcccaaccaccctggggacatgtcatcagtgcaaggctcttgcattggttggaaccccgagagcgcgccaacagacaacatgaggcggtgtggagcaacatgctgttttaatgagcgcctgcatgcagacaggctgaggcctaaaatggcatcagccccaagtgaggatggggcaggggttttatagtcctctgtaaacaggaattgtcccagcctaacgtgactgctatgtagtaccagggcgacctccctcttgatcttcagggggtacgtgtcttccagccagctctcttcctgcctctgctatcttgctgctggtgcaagtttgtaccttgggactgggcctgaggaggaggagttattcatcccgcaagctttcaggccccgaggagaatcttccattcctgtctatttggttatagaaaaggggaaagggacgactttctcaataactacttcaggcgtgacataggggtggcgtgggcaccttggaaaaagaaaaacttaatttttggggtattcttgagagacgggttggtatccatcgtgccgctgtagcaggagcatcatctggattgtcaggaggttaactgtagtttcaacaagagttttaatgggataccacaggggagaaacaggaggaccccagtgatgaaaatgactgtccccaccagcattttaaatcctcctaaattagagaaccaccctcctagaaggtttgctgggtcccatccctcccaggtttggactggtacacgggctacttttctgatgtttgaagcgatttccagaacctcttctccattattgcctatgttaagacagcaattggagatgttaaacttaccacagcccgcaccctcttctgctaataagtagtctagggccagcctgttttgataaattgccgcgcgcatttggttttgttgttgcgcgagcatttctagggctgaggcagtttggttagtgattatctctagaacagcttgtagtctaatcgctctatttggcatatatatgggagtgcgataaccccatgaaccatcctctgcccaagtggcaggaccatagtattcaatgatccgttgcagaggccactcgtcctctcacaatctttggctccctcctacctccaaggatcatttttctctggttatcatacacagggactctgagggtgttgcccgcctgcttcggaagtaaaaagaatccaggttgaattgtgcctaggaagcaagtaccttgccagtgataaggtagctgtgagtaagcctgggttccccatatccacaggaatccgtcagtggcagtccattgtcagctggtgttcctaggattgtcgcatagtacacttaggcggaggtatgcggcataagggttagtggtgttcgtacagtaccaggccttttttgacaagacacaattgaggtagcttaagttagaaggagaccaggctccagggggtaaccttggccaccactcagctatggaggcattgactgttagggtttggtgacgggttttcacctacggcgcgatgggttttatcagtccacttgcgggatatgcacaccgtccctcatactgggttggtaagtgtccaggactgcgggcattcctgaggagtgaaagtgagtctggggttttgggatgcctgtaagtaagggggaatgtctatcccgtcccacagccactgttcactcataaagctcccccgcatacccaacaattggacacattcatggtaagcacaatggttctcctagatctacaaacagattttttcctggcttaggaagggatgcatctgcttatagtttttgtataaaggaatggaaatgccgcgggcgattttcagggggagttgttggttttgaggctttggctttggctataatctgttctctctttatgtcctcaagcacctgagtgtttactccccattgtccaattttggtgaagcaaagccactgcttccctctggggcaaatagccccattacgactgccacatactcctagattctttactttataataactctttcctgattcaacacattcctcgattaagtttccataacaggatctttctatatgagtatggtaagtaaagtattgttgcatctcccctctgtagtgcaaagactgataacactcacggcagctcggaggggctgctgtggacagcaggacagctactgacagtattaggatcgtggtgagggatattcccatattaagacttttggttggaagagaggtatagaaagtggttgggtagatacaggccattcctggaagcacgtggttagtcttccttgtgttttggttttaagaaaaaaatgttggttaatttaaacttggtaggagaaattggcccagacaaacacttagctgttaatgttttggaggaagaagctgccttgggggtgagcttgaccctggtgcgatggatccagttggggagtcctcggactctcactgcagttggtgtgctgagtatcacagtgtaggggcctgtccacttcggtggtagctttttgtgagggtcagtttggccgataaacacgtctgtgcctgcaagacagttatgatgttgagaggataaggaggtgtcggcagggagaggcatggcctcactcactgcttcacgagtgaaagaccgtgtctggattaaggaggggaggtaattcctgagtggctcagagtctgttaagggtggaggctctaagacaaaagttcggccatacatgatctcaaagggactataaaaaaaggctgcctttggtgttgccagagtctcatgagggcgaaagggagacttctcgtacacgactggcagatttctagagtgagcttggtgagttgggctttaaggacagagttgaccttttcaacttagcctgaagattgaggccggtagggtgtgtggagaacccattttattcccaaggatgtagaggcgccttgggtgatttggctgataaaggcaggcccgttatcggaccggatggatgttgggagtctgaaacagggaattatatgcatgttgagagtttgtgtgatgatatttgcaccttctgaagttgttgggaatgcttctacccacctggagaaagtacagacaaagactagaagatagtggagccatttatggggcagcatgtgaataagtctacctaccaatcctgcccgggtaccttgccctgggcttggtgggtaggaaaaggcagtggccagagggaaccctggggtgacattgagtggcagatagagcaggactgggtgacctctcgaacacggctggaaagatgaggacaaatgaggatagggcagagacgttgcaggacaggtttgtacccgacgaggacaaatgaggatagggcagagacgttgcaggacaggtttgtacccgacatggaaagagttgtggaggctttggaggacagggattgtttgagagtgaggacagcgaagcgcacttccttgacataccgtggtccttgtttttgaaggttttgggcttggcagtcctccttttcttctggggagtaaagaggagagaacgaggacagggaaagaaactggccttgcacgggttgtagggccatttgtttggctactctatctgctaaagcatttctggccaatataggattgtctggggtttggtggcccctgcagtgaatgatggcaagtttctgcgggagcctggcaacctgaaggagcttgctgatgagagcattcatgacaggggtgttgtttgcagttaggaaacccccttctttccagatggacaagtgtgagtgcactacgtggaacacataatgagaatctgaatacatgtccagctgctcgagtgagagctcaagtgaggacgatgagttcagccttttgggaggtggttcctagggggaccagattagcttcaatagtgtgggtgggtgacactatagcatagccagcatgttggcatccttgatgtaggaaggagctgccatctacaaaccaagtaaaggaggcatctggaaggggttggtctgttaggtgtggaaaaggtaagaaaagtttgaacagtgtccacacagaagtgtgcagggtcttgggaggtagtggcttcaggtaagagtgtggccgggtttagacaggagctggttagcacggtgatttggggggtttctatgaataaagcatacagttggaggagccgtggggcagagatgagacttagtacgctgcggtgagctagcatgtctttgatgctatgggctgactaaactgttaggttggcatcaagagatagttttaggctttcaagggtgaggacagcagctgccaccagtgcttggaagcaagcagcccatccgagaactgtggtttcgagctgtttagagaggtaggcaacaacctggagggcgggtcccttagactgggttagaacacgtagtgcgactccatgccgttcgtcaggatagagggagaaaggtttggtgaggtctgggagggtgaggatggggactggggtgacagacttctggagtaggcagaaaggttgggtaataggctgtgcagggtttaaaggctcatggagagggcctttagcagcttggtataacagtttggctagtagagcgaaggagggaacccagagcctgaaatatcccgctagtcctagaaaagagagaatttcttgcttagtttgcggaggcgggagggactggaagagggatatgtggtctgttatgagcccttgggttcatggggtaagagctaggcctagatagatgactgagggggtgcatgtttgcgcttttttaggggatacctgatacccccactctgccagaagtttaaaagagagatagtatgggcattgcagtctttttgagaggggctacccaggagcagatcatcaaggagagtggacggttttagggataaggtacagaggtcatgatcaagggcctgtccaaaaaggtgggtgctgtctctaaaaccttgaggtagtaggcaccagtgagctgatgtgaaaggcgggtgctgtctctaaaaccttgaggtagtaggcaccagtgagctgatgtgaaaggtgggtgttggggtcttcccacataacaacaaagaggtcttgagaatcagggtgcaaatgaactgtggaaaaaagcatcctttaggtctaggacagaaaaatgggtggtattggagggaattttggaaagtaaagtgtatgggttagggactactggacatactgggagtacagtttggttaatgagcctgaagtcctggactaagtggtaagttccatctggctttttaacaggtagaattggtgtgtttaaaagggagtttgttgggcggaggaggtgactggcgaggaggcgagaaatgataagctataggcctacaagagctgcttaggggattggatactgcttctgtgataggaactgggtggggattttaagggtaatgcagaagggggtgtggtgttttgcaactgagggtgtggaagtatctcaaaacagcggggttaaccatggatgggggataaggaaaggttgcatgttttagggtgggaggttgcaggagtagaagaaagttagaagccctggaggggtctgggtggatgcgttgggtactaggggaacgtgggagtggagagtggtgtggagttttgaaagcatggctctgcctaggagtggagttgggcatgagggcaggactaagagtgagtgaaggaaggccgggcgcggtggctcaagcctgtaatcccagcactttgggaggccgaggtgggtggatcatgaggtcaggagatcgagaccatcctggataacacggtgaaaccccgtctctactaaaaatacaaaaatttagctcggcatagtggcgggcgcctgtagtcccagctactcgggaggctgaggcaggagaatggcgtgaacccgggaggcggagcttgcagtgagcggagattgcgccactgcactccagcctgggagacagagccagactccgtctcaaaaaaaaaaaaaaaaaaaaaaaaaagtgagtgaaggaaaaggcatgaagggagcagaagggtggaggggggctcgggatttggagaccatcagttgtccatcaattcccacaacagagacctgggaggactcggtgagtcctgaaaaattaggtaaagcagagtaggttgacttgatattaattttaaaaacatactggcctacctgccattatcagggttacccttggctcagatgaggcaatggtagttgccggggtgtccgttccagggcactgtcagtcttcagcggcaaggccgatgagatcgagtaggttttggccggctcaggaagggatggaggcggtccttgcaggggccgctcacagtccgacttccagtggggtcctctgcagagggggcacggcctggggggcttacctgggtttgggcattgcctggaccggtggccttcattgccacacttgaaacagacgccaggtgcaggtggcttgctaggaggctcccgtgtggagctgcggccccgtgggcctgcagggcctcccgatggcggaggcaagcattcgaaactctgcctgtttttgcctttcactttcttcatcacaattattaaaggctttgagggctaaattgagaaggtctcgttgtggggtttgagggccatcgtcaagcttctgaagcttgagctggatatcagggatgggttgggagatgaaccgaaggcttaagatagtggttccttctgggctggctgggtctaggttggtatattttctcatggcttccattaaacaagagaggaaaaagggctgggttttcgtcaggaccttgggtgatttctaaaagtttttcatagtttaccgctttatgggcacactttttgagtcctgcaaggagacacacaatcatgtggtctcgatggcagcatccaaaggccccatcttgataatcccagtgggggtcctggctggggactgcctctgtgccagcaggctgggcggcagcttggtgatgaattgtatcagcatgtgcctgagctagggtccagatacggtcccagtcttctggggtgagcgtggaagagaggataacgtagaggtcatgccaagttagttcataagactgggtgaggtactgaaactctctaatataagaggcagggtattctggaaataaaccgagtcttttgtgaattcaagagcgatcagtgagggagaagggaacatgaactctaataagatcttcagttcctgctacttcccgaagggggcattctagcacagacgctgaagtaagggtggggcatgggccaaaagcaatgcctgaatgagtataggcgggaaagaaagaaaagccggaagtggttcctgctgagggtttgaagggggaaggagggttgagttaataggcagcagaggatagataggagcggaaggtggcggggtgggtttacaggcctcaggagagagcggtgggggaggagaatgggtacaggcagtgcaagaattgtcctgaggagaggatggtgtaggaaaagaagtggatactcttggaggcagtgctggctgggaagacaaagaggaggcttagggggttaaagaagacggttgagaggaagaggcaggggctggaaggggtggacagcagttggctggatccaacaaggaaaaagagttagggtcgggaggagaacggcgatcagggcggcgagaatggagggggaggatttgaacaggtgagcaagagcagaggccaggttgtaatctgagtgtgaacaaggcctggatataaggaatttctccccatttttccagccgtcagcaataattgcttaagtcagttaaaattgtaaagtcgtatgttccatttgtggcccatttggacccactgtccaatttgtactgtggccagactgaattgcaaaaaaagaacaaggtgcttagagggatatctcgcctgaggtctaaggtttgcaggtttttcatgaggcagcctagagggctgtcctttggaatggaagactgggaattttccataatggagggtaggctcaggagaacgggaaaagcagaccgtcctggacagccggagggagacgataaaaggagcgtttgtcaccgctgcctttttcattcccagaatgggatcaactggcttagagtccccctaagaccagatgatcagcgagtgcctggcacacaccttagcatttttttttttttttgagacagagtcttgctctgttacccaggctagagtgcagtggcgcgatctctgctcactgcaacctccacctcccgggttcaagcgatcctcctgcctcagcctcccgagtagctgggattacaggggcctgccactgtgcccagctaatttttgtatttttagtagagacggagtttcaccatgttgaccaggctggtctcgaactcctgatctcgtgaatccaacggccttggcctcccaaagtgctgggattacgggcgtgaaccaccacgcccggccatgccatagccttcttggacccatgttggattttggggctggagaaaccaagagaggccgtgcggatttttccctgttaaccgggctcccaggaaacttaccagtaggcgagatcagtgaccgatgtgcatgcacagagaggcgactagaggctgaggagcttcctttgtccggctgctgtggcctgctttcccagatggaggggtggtaggtccactggggacgtggacggaagcccctcgcaggtttcagggccagccccaaggctcttgcattggttggaacccggagagcgcgccaacagacaacacgaggcggtgtggagcaacacactgttttaataagcacctggatgcagacagactgaggcctagaatggcatcagccccaagtgaggagggggcagggcttttatagttctctgtaaacaggaattgtcccagcctgacgtgactgctatgtagtacgcggacggcctcccccttgatcttcagagagtatgtgtcttccagccagctcttttcctgcctctgctatcttgctgctggtgcaagtttgagcgttgggactgggcctgaggaggaggagttactcattccctcaagctttcaggcccctgggagaatctttcaatcaggacttcctgaggcggtgtcacaggtccctgcccaaccttggcaaaataaactttctaaattaacaagagacctgtctcagccgggcacggtggctcacacctgtaatcccagcactttgggaggcccaggcgggcagatcacgaggtcaggagatcgagaccgtcctggctaacacggtgaaaccccgtctctactaaaaatacaaaaaattagccgggcatggttgcaggcgcctgtagtcccagctacttgggaggctgagccaggagaatggcctgaacccgggaggcagagcttgcagtgagcggagatcgcgccaccgcactccagcctggacgacagagcgagcctccatctcaaaaaaaaaaacctgtctcagattttccacatccgcacccaaaatggcatcaaactcctggcctcaagtaacccatctgcctcggcctcccaaagcgctgggattacaggcgtgagccattgtgcctggcctcaagtgggatttttttttttaattctgagacagagtctaactctattgcccaggctggactgcagtggtgccatcttggctcagtgcaacctccatctcccgggttcaagcgattgtcctgcctcagcctcctgagtacctgggattacatgtgcacgccatcacgcccagctaatttttttttttttttttttttttttttttttggtagagatggggtttagccatgttggccaggctggtctcaaactcctgacctcaaatgacctcaaatgacctcaaatgatctggcctgccttggcctcccaaagagctgaaattataggcatgagccatccgcacctgcccacaagtgggttttttgttttttgtttcttggtttttttttttttttttttttttgagacggagtctcgctctgtcgcccaggctggagtgcagtggcgcgatctcggctcactgcaagctccgcctcccgggttcccgccattctcctgcctcagcctcccgagtagctgggactacaggcacccgccaccacgcccggctaatttttttgtatttttagtagagacggggtttcactgtgttagccaggagggtctcaatttcctgacctcgtgatccgcccgcctctcctgccgaagtgctgggattacaggcgtgagtcaccgcgcccggccaacaagtggatttttaaaggaaaaaagaggcagttgctaaattcctcgccaacaatttacattaaaatacataagcgatttattggcttgttctttgtatcacaaattccacaaatttagaaacgtgattgtaatgagtgaagcaggtattcagggactacatggctaaacaattgcgctgggcatgggtggagggcacgagtgaagtcccgagctcaggtctctctgtgcaagcctagcagagcacagaacgctctgggctatcttttcacctagggaatactgtgggcgggacaaatctggggttatagacaagctggggacggctgtgcctcgctgggggactgacacaggcagccagtgtgtgagcccaaagcttccaagacacctctcagccaatgtggaaagtttattttgccgagtttacagacgcgcctgtgacagcctcaggaggacccgagggcgtgtgcccaaggtggtcgggcacagcttgctttcatacacttcagggagacatgagacatcaatcagtatgtgtgaggccggccgtggtggctcacgcctgtaaccccagcactttgggaggccgaggcgggccgatcacctgaggtccggagtttgagaccagcctggccaacatggtgaaaccccatctctactaaaaacaaaaaattagccgggcgtggtggtgggtgcctgcagtcccagctactcgggaggccgaggcaggagaatggcttgaacccgggaggtggaggttgcggtgagcggagatcgcgccactgcactccagcctgggtgacagggtgagactccatctcaaaaaaaaaaaaaaggagagagagacaaaagttgcattcttttgagtccttggtcagccttccactgaatacacaattgagtctggctcagcgaatctgcatttttacataaacaatagggcagaggaagcaatcagatgtgcatttgtctcaggggagcctcagagggatgactgagttttctgtcctttgtccacaaggaattttcctgtgagcaaattgtgagggacatatatatgctcttttctttgtacctgttttatttaggagtagaatgggaggcaggttttcctgacatggttcccagcttgacttcccttggcttagtgatttgggtgtcctgagatttattttcatttcacaggtgtcttgaaactgcctttgaaaaatggtgacagttggctgggcgcggtggctcacgcctgtaatcccagcactttgggaggccaaggtgggtggatcacgaggtcaggagatccagaccatcctggctaacatggtgaaaccccgtctctactaaaaataaaaaaaattagccgggcgtggtggcgggtgcctgtagtcccagctacttgggaggctgaggcaggagaatgtatgaacccggcaggcggagcttgcagtgagccgagattgcgccactgcactccagcatgggcgacagagcgagactccgtctcaaaaaaaaaaaaaaaagaaaagaaaaagaaaaatggtgacagtaggagaaatctgacagagagtagactccaccttgcttctgatctctagcggctcttgctcattcctgggcgtaaaccaagctaaccatggaggaatttcgtttgtaattcaacttgaaagcaaggatgctaatagtcctttcctgacactaaccctcctcgctcagggaccaaaaactgcctttcaaagactaatgaaaggccacaagaataatattatgggacaggcctgaataaatgtagctgtaatttctttctttctttctttctttttttctttttgagaaaaagtctcactctgtcacccaggctggagcacagtggtgctatctcggttcaccacaacctccgcctcgcaggttcaagcgattctcctgcctcagcctcccgagtagccgggactacaggcgtgtgccaccatgcccagctaatttttgtatttttagtagtaacagagtttcactatgttggccaggctggtcttgaactcctgacgttgtgatctgcccatctctgcctcccaaagtgctgggattataggtgtgagccaccgtgccacccagcagtgtagtttgtttgtttgtttgtttctttttttctttctttctttttttctttctttctttctttctttttttcagacagggtctcactctgttgcttaggctggagtacagtggtatgaacttggctcagttgcaacctccattgcctgagctcaggtgatcctcctgcctcagcctcctaagtagctgggaccacaggcgcgtgccaccatgcccagctaattttttgtattttttatagagatgggggtttcaccgtgttgctcaggctggtctggaactcctgggctcaaaggatcctcccaccttggcctcccaaagtgttgggattacaggcgtgagccactgctctgggcctataatcctttactgcccaggaacaatatagccagaggcagctggatttgtgacttcctcaattgctccaatagataacatcactattgtagaacctaagattggcctttttttctttttgagacacttttgtctcccaggctggagtgcaatggcacgatctcagatcactgcaacctccgcctcctgggttcaagccattctcctacctcagcctcccaagtagctgggattataggcacccgccaccatgcccgggtaatttttgtgtttttagtagagacggggtttcatcatattggccaggctggtctcaaacgcctgacctcagatgatccagctgcctcgggctcccagagtgctgggattacagccgcgagccaccgtgaccagacgaaattggtcttttgagatttttttttcaaactttctggtgtgaaccccaaatatatgagactggtctcagtcaatttaggaagtttattttgtcaaagttaaggacacatgctgtgacacagcctcaggtggtcctgataatatgtgcccaaaatggtcggggcacagtttggtgtgacatacttcagggaggcatgcaacatcaatcaatatgtgtcaggtgtccattggttcgacctggaagtgtgggacagcttgaagcagggagagggctcccaagtcataggtagataagagacaaatggttgtgttcttttgcatttctgactagcctttacaaaggaggcaaccagatatgcctttatcttagtgagcagagggatgactttgactagcgtggaaggcaggtttgccaggagcagttcccagcttgacttttccctttgtgatttgggggtccctagatttattttcctttcacattggcaactgagtggccctactgggacccgtgacttgtgacccagccaatcctgtggccccacccagaggcagactcagcacaggaggactgttctccatacctgtaagatttttctttatatatatatatagtggcactatcacagttcactgcagcctccaactctgtgattgaagtgatcctcccacctcagcctcccaagtagctagaactacaggcatgtgccaccacgcctggctaattgttttgttgttgtggtggtggtggttgtttttgagatggagtttcactcttgttgcccaggctggagtgcagtggcacagtctcggctcactgcaacctccacctcccaggttcaagcaattctcctgcctcagcctcccgaatagctgggattacaggcgtgcgccaccacacccggataattttgtatttttactagagacagggtctctccatgttggttaggctggtctagaactcaggttatccaccctggcctcccaaagtgctgaaattacaggtgtgagctactgcactcggctgttgttgttgtgttcttgttgttattgttgtttttgagatggagtctcgctctgttgcccaggctggagtgcactggcacaatctcggctcactgcaacctctgcctcccgggttcaagcgattcctgtgcctcaacacccccattagctgggattacaggcatgccccaccatgccccactaatttttatatttttagtagagatggggtttcaccatgttggccaggctggtctcgaactcttgacctcagttgatccacccgcttcagcctcccaaagtgctgggattacaggcatgagccaccacaccactccctggctaatttttaaaaattttttgtagacaagggtttcactttgttgcccaggctggtctctaactcctggcctcaaatgatcctcccacctcagcctcccaaagagctgggattacaggcatgagccacagtgcccaggtgatacccctatcatttcatctcaaccatttagctgcacccatcctctagctccacgcctaccagattgtccataaaaaccctaacctgcaagcctctggggagactgatttgagtaggaactccatctcccacggggctggactcacattaattaaactctttctttactgcaataccgcagtcagtctcagtgacctgatgtcatctatgcggcaggcaggaagagcccatcagggaatcatagtcttgctgtaaacctggggagaaagtgacggatcagagggaagcttctttgtacttctgagtcagtcaaggcctgacccacagatccgcatggcaggatccttctggaggctccccagggccacaagagcagcttcctgcaccactgggtcgtctgttcccatgatgccagctcagtggagggagtagaaccactgcactgagggatgtggtcctgttgctccgcacaggcagccactactctttttttctatttttttagaaatgagttctcaccatgtcgtcctggctggagtgcagtggcatgatcacattgagggaagacagagaccctctcatattgttttatactcagaaaaagaaagagaagcgaaactaaaggcaggtagcccggtgcctaggaagcagacccgaaaccaggcctgggcctgcctgacctaagcctggtagttaaaattcgacccctgacctaggaactgatgttatctatagattccagacattgtgtggaaggacattgtgaaacctccagttctgttctttttcactctgaccaccggtgctcgcagcccctgtcacataccccctggctttctcaattgatcacgaccctctcacacggacccccttagagttgtgagcccttaaaagggacagaagttgagcacccaaggagctcggattttaagacgctagcgtgcccatgctcccagctgattacagccactcccttcactatcttggtgtctgaggggttttgtccacggctcgtcctgctacatttcttggttccctgaccgggaagtgaggtgattaatggacagtcgaggcagctccttaggtggctttagcctgccctgtggaacatccctgcgggggactccaaccagctggagcgacacggatcctgagagtgctcccgggtaggcatttgccccggtgggacgccccccagagcagtgtgtggcaggctcccatggaggatcaatgcagtggctgaacaccgggaaggaactggcacctggagtccagacatctgaaacttggtaagactggtctttggaacttgcccactccatttgagtggaagcgtggcctgatcacccacggcgtgcctgtacaggcactttggttttggttttgacttggtttgaattgcttgacaggactggtcttgggaacttgcccactccatttgagtggaagggtggcctgatcacccacagtgtgcctgtaccagcactttggtttttgtttttgacttgacttagattgcttgatactttggttttggttttgacctggcttggatttctggatactctgattttggttttgattttggtttggtgtaaactgcaaaagtgtgtgtgtgccctttttacctgttctttgttttgtggtgtgcgtgtggtgtgagcgtggtgttttgtcttgaagaagcatgggtgagaaacaaataagcccaccctactaggaactatattgaaaattttcaagaaaggatttgagggagattacggtgttactatgacaccaggaaatcttagaactttgtgtgaaatagaccggccagcattagaggtaggttggccatcagaaagaagcttggacacggcccttgtttcaaaggtacggcacaaagtaacttgtaagccagggcacccagaccagtttctgtacatagacacttagtcacagctggttttagaccccttccccccaacagtagttaagagagacagaaagtcaaagagagaagaaaaagagaaagagagaaatatacaagtagttaagaaaaaaaacagtataccctatttctttaaaagccaaggtaaatttaaaacctataattgataattaaaggtattctccataagccggaaacactctaataccactttgttgtcagtgtaaacaagggcgtatcccgaaagcattgaggccttcctatcaaaaatccttaacccagtaacccgtggatggcccagatgcattcaatctgtagcggcagctgctttgctaacagaaaaaaaagtaaaaaaaaaaaaaaaaaaggcagttgcagttttaacccagactgtagggcccctgccaaggccagtggcctatctctcaaaacaactagatggggtttccaaaggctggcccccaagtctaagggccctggcagcaatggccctgttagcacaagaagcagataagctaactcttaggcaaaacctaaagtccccccatactgtggtgactttaataaataccaaaggacatcattagctaatgaatgctagactaactagataccaaagcttgctctgtgaaaatccccgcataagcatcgaagtttgcaacaccctaagccccgccaccttgctcctggtatcagagagcccagttaaacataactgtgtagaagtgttggactcagtttattctagggggcccaacctccgagaccatccttaaacatcagtagactgggagctgtacgtggatgggagcagcttcgccaactcctgcaaagtaactctgaagaagacgacaagccctgctccagtcacacccggaagctgactggtccacacacggccgaagcatgagacaactcatcgcgggactcattttccttaaaatttggacttgtacagtaaggacttcaactgaccttccttagactgaggactgttcccagtatatacatcaagtcactaaggtaggacaaaagattgctacagtcctgttattttatggttattataagtgtaccgggactctaaaagaaacttgtttgtataatgctattctatccaaggtatgtagctcaggaaataaccaacctgatgcctgttatgacccattttaagcctcccatgatcacagtttttagaataaaattaaggactggtcattttctaggcgacgcaagtaaagtaacagctaagacagaagaaagatgggtccccaagcatataaccctaaaacttaatgcttgtgccactatcaatagcaatcggcataggataagatgtggttctttaaattgaaaaaaaaaagttacacggcaggaaataagtatatctgccatgaattaagctcatgtgcaactgtgtgtaattactggtcttgtgtcatctggactacttggaaaaaggatgaaaaaatcctgtttagctccaaaaaggagaaggcagccccgcctgtatgagtggaagctgcaaccccttaaaattagtaattacaaatcccttaaacccaaggtagaaaaaaagagaacacatatctctgggcatggatagaaaaggactagatcctagagtaaatatcgtagtaaaagaggaggttcataaactctctctagaaccagtatttcagactttctatgatgaactaaatgtgccagtaccagagactccaggaaaaaccagaaatcatttttgcaattagccaagcatgtagcccagtctctaaatgtcacttcatgttatgtttgtggagaaactgtaataggagatcaatggccataagaagcctgagaattagtgcctacagacccagttcctgatgaattcccggcccaaaagaaatcaccttgatcatttctaggttctaaaagtctcaattattagaaaatattgcatagtttaaaaaaggaaagaattcactcattctgtaggatgacttagttgccttggacaaaaactgtataatggtaccacaaaaacagttacatgtggagttcaagccatacagataaaaatccattcagtaaatttccaaagttgctgactgtttgggcccccccagaatcccactggggctggaggcccccactgggctatactagatatgtagacatccagcccatgctaagctgcctgaccagtggacaggtagttgtgttattggcactattaaaccatctttcttcctactgcccataagaacaggtgaactcctgggcttccctgtctatgcctcctgcaaaaagtgaaacatagccatagataattaaaaagatgatgaatggcctcctaaaaaaattatacaatactcatgattgtgggcgcctgtagtcccagctactcaggaggctgaggcaggagaatggcgtgaacccgggaggcggagcttgcagtgagccgagatcacaccactgcactccagcctgggtgacagagcgagactccgtctcaaaaaaaaaaaaaaaaaaaattatacgatactataggcctgccacttagacataacacaggtcatggggataccggacccccatttacatgctcaacgaaatcatacagttgcaagctgttttagaaatcatcactaataaaaccggtcaagccttgactgttctggcccagcaagaaactcggagaagaactgctatctatcaaaatacactggctagcagctacttgccatcgatcaatagatcgactacttgctagcaggcgaaagagaggtctacaagaaatttaaccttactaattactgtgtacacatagataattaaagacaagtagttaaagacatagttagaaatatgacaaaactggcacatgtgcccttgcaagtgtaacacggattcggccctggagccaggtggttcccagcactagaaggatttaaaactcttataataggagttataatagtaacagaaacctgcttactgctcccttatttgctacctgtacctcttcaaatgataaaaagcttcatcgctaccttagttcaccaaaatgcatcagcacaagtgtactatatgaatcactagcaatctattgtacaatgtaatgcccaaccttgttcttactaaccctgttcttagactctccctttcctttactcacctagcctcatttccacctgaatggactctcccttagctgagagagccagacagactccatcttggctctttccctggcagccccttcctcaaggacttaacttgtgcaagctgactcccagcacatccaagaatgcagttaactgataagatactgtggcgagctatatccgcagttcccaggaattcgtctgattgataacgcccaaagccaagactatcatcttgtaatagtcttaaagcccctgcacctggaactgtttactttcctgtaaccatttatccttttaacttttttgcctactttacttctgtaaaattgttttaactagaccccccctcccctttctaaaccaaagtataaaagaaaatctagccccttcttcggggccaagagaactttgagcattagccatctcttggccgcaggctaaataaacggactcttaattcgtctcaaagtgtggcgttttctctaactcgctcaggtacaacaacaagaagacataagtggcaaagataagagtgagaactcccactaataaaaagtgagagtctcaaagcaggggaatgaggtaagagagagaccctctcatattgttttatattgttctatactcagaaaaagagaagtgaaactaaaggcaggtagcccggcgcctaggaagcagacccgaaaccaggcctgggcctgcctgacctaagcctggtagttaaaattcgacccctgacctaggaactgatgttatctatagattccagacattgtgtggaaggacattgtgaaacctcccgttctgttctttttcactctgaccaccggtgctcgcagcccccgtcacataccccctggcttgctcaatcgatcacgaccctctcacacggacccccttagagttgtgagcccttaaaagggacagaagttgagcactgaggagctcggattttaagacgctagcctgcccatgctcccagctgattacagccactcccttcactatcttggtgtctgaggggttttgtccacagctcatcctgctaaaacagctcactacaatctcaaactcctgagctccagtgattctcctgcctgtgaaaggaaaacaaatcttgcccctgcccccaccccaaatcactaagctaaagggaaaagtgaagctggaaactgcttagggccaacctgcctcccattctattcaaagtcacccctctgctcactgaggtaaatgcatgtctgatggcctcctttgaaaagactaatcagaaactcaaaagaatgcaaccatttgtctgtctcctacctgtgacctgcaagccccctccccgcttcctgtcttcctgcctttgcttcaggttgtcctgccttccagaccgaaccaatgtacttcttacctatattgattgatgtctcacgtctccctaaaatgtataaaaccaaactgtgccccgaccaccctgggcacgtgttgtcaggacctcctgaagctgtgtcgcgggtgcgtactcaaccttcgcaaaataaactttctaaattaactgaggcctgcctcaaattttcaaggttcccgtgccttagcctcccgagtaactgggactacaggcacgtgccaccacgcccgactaattttgttgttgttgagacagagtctagctatattgcccaggctggtctccaactgctgggctcaagtgatcttcctgcctctgcctcccaaagcgctgggattacagccacgagccaccatgcccggccttctttttctctttccagcattggctttgaaatcttatgaaatccaagcggatgggagcctaagctaacgagtatgtcttgatggttttagttcatcagaacccttgccaagacttttatttttaaatgtacggcttaaaatatatcatcctcggccctgagccaatgagaggaagccaaggtaaaacactctcttctccaggacatatggaaagtcgctgctgccggagtaagggagaaattctagaaaggacgttctagtgcaacaggcaaagtttcatggcaccgacagctattttccaggaaagaagctttaaactatggagtttatggaaaaaaagaaaggggggaaaagacatttctgcaaactgacctaagccctgggaatctgaaccttcctatctgaggaaagggaggggggactccgagggcctctgcaggacacaggtgcaatgtttacctgctgctgtcagtgaggatcctctgcatggaggagcccttccttggcctgagttgtacttaaaagcaggcacttgtctttcatttttttgagacagggtctcactctgtcccccaggctggagtgcagtggcgtgaccatggctcactgcaacctccacctcccgggttcaagcgattctcccacctcagcctcccaagtagatgggaccacaggcgtgcaccaccacgcccagctcatttttgtattttttgctagagatagggtttcaccatcttggccagactggtcacaaactcttgacctcaagtgatcttcctacctcagcttcccaaagtgctgagatttcaggcgtgagccaccgcgccagcccaggctgttgtctttctcatggctttgagtttccacccttcctcccttttccttgtgccactgagcactttaaaaatcctaattgtgtcaccagacgggttgcaaactaaggcatctacttgcgggagtcagcctaagccagctcatggggcttgaagttttctttggttttttgtttcttgttttttttttttttttttttttttttgagacggaattttgctcttattgccgaggctggagtgcaatggtgcgatctcagctcactgcaacctctgcctcccgggttcaagcgattctcctgcttcagcctcccgagtagctgggattacaagcatgcgccatcaagcttggctgatttttttgtatttttagtagagatgggatttctccatgttggccaggctggtcttgaactcccgacctcaggtgatccacccacctcggcctcccaaagtgctgggattgcaggcgtgagccaccgcccccggtcacagtatttttaaggtgtattttccagcatcttttgatgctcttcatacttttttcaacctttcagttatttaagtgcatcattctctttccacaatctcagcaccctgagggtttccgcttctcttctgcccctttggtgaatgctctatttatgattcttcttgtaaaactgaacacgttgggtggctcttccactcagcccagctggagctacactgcctagaggccagggtgatcctgggatgtcacaagcgcagtgaagggacccttatgttacaggaaaggggtccagatccagaccccaaaagagggttcttagatctcgtgccaaaaagaattcagggccagtctgtaaagcgaaaccaagtttattaagaaagtaaaggaataagggaatggctactccaaaggcggaataggaatacgactaggaaacggcatgcagtgctactagatagtcaaagtttcagattttttaatttattgttgggattggggtgtcgttagaaaaaagtatgaaaagagacggttagcagtgcaattgaagacatgttaggttaatatataatgtatgagtctgtgtaacggatagtttttattcatcataaaattctcaaaagactcacagatgtgtggcccttgcagctgttcttcccttgctaacagcgttaggctctgactcagaggagttttgtgccaaagaattctggcagcgtctacagttcttgtgaaattcccagtgaggaaatcgttcactgtgagcaggggcgatgatgacaagacgatccaggggatggggaaggagcccaggaagaaagaatacagagccccgggcatgtgaaatgtatcagcctcaaaattcttatctttctttacatctttctatttacaaagtcttgtttttgtttttgtttgagatggagtttcactctgtcgcccaggctggagtgcagtggcactatcttggctcaccacaacctccgcctcccagcttcaagcacttctcctgcctcagcctcccgagtagctgggattacaggcacgcgccaccacacctggctaattttgtatttttagcagagatggggtttctccatgttggtcaggctggtctcaaactcccgacttcaggtgattgccagcctcggcctcccaaagtgctggaattacaggtgtgagccaccacacccgaccctgtttttgttttttgacatgcagtctcactgtgtcaccgaagctggagtgcaatggtatgatgctggctcactgcagcttccacctcccaggttcaagggattctcctgcctcagcctccccagtagctgggactacaggtgcccgccaccacaaccagctaatatttgtatttttagtagagatggggcttcaccatgttggccaggctggtctcaaactcctaacctgaggtgatccacctgccttggcctcccaaagtgctgagattacatgtgtgagccaccgcacccagcccaaagtctgtttttcttggcgggggttggcagtcagggagcaaatcagagtggcctatgcacaaaaggttgagaacagaactgtgatttggagagggaattctccagccagcgtgtcacaaagccgctcacctgctcgtgtgagtgtctgaatgcacgtgtttgagtgtcaggggcgtgtgaaccacagcaactcaatcttgaataggggctgggtaaagtgaggctgagacctcccggggctgcattcccagatggttaaggcattctaagtcacaagatgagataggaagttcgcacaagacactggtcataaagaccttgctgataaaacaggttgcagtaaagaagccggctagggccgggcgcggtggctcatgcctataatcccagcactttgggagcccaaggcaggcggatcacctgaggtcaggagttcgagaccagcctgaccaacatggagaaaccctgtctctactaaaaagtacaaaattagccgggtgtggcggtgcatgccagtagtcccagctactcgggagactgaagcaggagaattgcttgatcccgggaggcggaggttgtggtgggccgagatcgcactattgcacttcagcctgggcaacaagagtgaaactgtctcacacacacacaaaaagttataggtaggacaatttccaggtatggttgttttgcaatcagggcatctcagcgggtccaccaaataggaggtttgtctctgtgcctggatggtttcattactcattcatgagacaaagagcgggaaggtagagggtctgggtgtggctttgtcacaggtaaacactggtgccggatgggcacggtggctcaagcctataatcttagcactttggaaggtggaggcaggaggatccgttgagcccaggaatttgagaccagcctgcacaacatggcgagatctcatctctacaaaaatttaaaagttaaccaggcatggtggtgcatgcctgtaattccagctactctggaggctgaggtgggaagattgacccagcccaggaagcggaggttgcagtgagctatgattgcaccattgcactccagcctgggcaacggggcgagaccctgtctcaaaaacaaaaacaaaatgtaggatataataaattcttcttcaaaggttttagcctgtaaattgtttagtacaatgagttctgagatcctctccaaagaaccagtgcatcagtatgttcagctcccctgttctttgttcttcattttaaaatttaatttcctctttcccttcgtctcctagcccctagtttcagtgaacagtcccctcctagcctctatcacctgctctgacctgagtcattctgagtcacctgttttgtaaccatccttcccgccaaactactcaccccgccactccagctcgtacccctgctctctttaaaacagccaactggaattagcttagacggtgcggtccaaccctagctaatatgggaatgacacagcagtaggggctgcatgcatcagggataagaaccccttcccttcccttttcagatttgctctcaccattgctccaccctcgaggtgcaccctcctatagaagtaacattgccttgctgagaaaattaaatttatgtttgagtgctatttctttgtggcaccaaaaatttatttctaacaaaaagaaagaaaaaaccaacactggtgccatcctagagttctggggagtcatgagcaagtgcacactgcgagtcttactgaagtcacaggggaggggtgggacacagtgtggggatctctccagggctctgctctctggtgcacagggctcagggaaggcccggcatttggcagttgcccagtgactcggggaaaagagggatggaccacactcagaaccctgcttagggcagcagaaggatgtaggcactgtccctggtacccaggcagcaggctgggcattccttggtcaatgtttgccaggcacatgataacctaagtgtgcaggtgatgttcaagccaggtcaggacatggggaaccacctggcttctctccagtgcttgccatgatgtcccaaatgaaggtgatttttttttcttttttttgagactaggtctcattcttttgcccaggctgcagtgcagtgtcaagatcacggctcactgcaacctctgcctcctgggctcaaatgatctgcccacatcagcctcctgagtagctgggaccacaggcgcccaccaccatggccggctaattttttgtacttttagtaaagacgggctttcaccatgttagccaggatggtctcgatctcctgacctcgtgatccacctgcctcggcctcccaaagtgctgggattacaggcctgagccactgcacccagccaagtgctgggaaccattttctaaacatggccccaggatcaaatccattccacacttgcatgggcacatgtgccagttttgtcgtatctctaactatgtcttcaactgcttgcccttcattatctatgtgtacgcagcaattagtaaggttaaatttcctacagacctttccttcagctgctagcaagtagttgagagctaatctattttgacatatagcatttctcatctgagcttcttgccaggccacaatagtcaaggctctgctggttttattaatgtttatttttaagacagcttgtaactgtatgattcggttgatcatgtaaatgggggtccggtatccccacgagccgtcttgtgcctaagtagcaggactataatgttgtatgattctctcagggggccatttatcattttttcaatttcttatggctacgattctcttttcgtgggaagaatagacagggaagcccaggagttcgcctgtttttttgggcagtaggaagaaagatggtttaatagtaccaataacacaactacctgcctactggtcaggtaatttggcgtaagctctgtgcctacatatccagtataatccagtgggggctgtccagtcctggtgggactccgggtgggtccacacagtttgcaactttgggaatttactaaatggatttctctctgtgtgatttgaactggagttcactggagtccaccaagtgactgtttttgtggtatcattatacagtttctgtctccgacaactaagtcgtcctctggggtgagtgaattctcttccttctctagctatgcaatattgtctaataattgaggcttttaggaccagaaattatcagggtgattcttttgagccaggaattcatcaggaactgggtctgtaggtactaattctcgggcttcccatggccattgatctcttattacagcttctccacatacatagcatgaagtgacattgagagactgggctatatgctcaactaatttcaaaaacaaatttcttgtttttcctgaaatttctggtactggcacatttagttcatcataggaagtttgaaacactggctcaggaaagcgtttgtaaacttctccttgaaccaagatatttagttgaggatccagtctggcccaatcaattcctaaggtcacgcgctcctctgtttttctagcgagggtcaaggggcttggttattactagctctaaggggttacattgtcccttagtacaggaagggccattttttcctttctgaaggtggactggatctttttcattttctttttgtccaagtggccaaaatgacacaagaccagtgtttacatttatttccacacagtgctaatttatgacagatgtatttattttctgccatatagccttttctaatgaagagaaccacaacttattcctaacttactactattaatgacagcacaggcatcaaattttaagatgaattgtttgggcacccctttttcttctgttttggctaacacttcactcgtatcatttatgagtccacaccagtcctcagtccttaatcttattttaaaaactatggtcatgggaggctcagatgggtcataacacacatcaggttggtcacttcctgggctacatactttgtatagaataacattacacgaacaagttctttttagagttccagtacacttataataaccataaaataataggaccatagcaaccttttgtcctacctcagtgacttgatgtatacaatgggaactgtccttagtctgaggaaggtcatttgaagtccttactgtaaaagtccaaattttaagaaaaatgagtcccgcaatgggttttctcatgcttcggctgtgtgtggaccagtcagcttccaggtgtgactggagtagggcttgtcgtcttcttcagagtcactttgcaggggttggcaaagctgctcccctccacgtactgctcacagtctactgatgttcaaggatggtctcagaggttaggcctgctagaataaactgagtccaacacctttacacagttatgttcaactgggctctctgataccgggagaaatgtggtggggtttagggtgttgcaaacttcaatggttatgtggggattttcaaatagcatgatttggtacttggttaatctatcatttgttaaccaatgatatcctttggtatttattaaggttaccacagcatggggggtctttatattcagattttgcttaagggttagtttatctgcttcttgtgctaacagggctgttgctgccagggcccttagacgtggggccagcctttggaaaccctgtctagttgttttgagaaatagaccactagccttgaccagggccccacagtctgggttaaaactccaactgccattttttctctttctgacacatagaatgttgagttttgtcaggtcaggtagcctcagggctggagctgacgtgagttttcttttaactcatgaaaagctcgttgctgttggttgtaatagatgtagtttatccaatctacatttttattaactgtcacctaccaaaatattgactcaaatcctgcagctatttgatttcaagctttaaattgatctggtattcctcgtgggactccaattgcgtctaaatagacatgagagttgaaagacccctaaggagcttctctcgctttatgatgtcttattgatgaaatgccagggtgaaagggatagccaaccggactaaagtacaagtgccactccagttattcggcagagtgcccagtaaaggtccaccacaataccaccacacatccgctcagggatgaacaagggctgcctcattgataagctcttgaaaattcttatgcttcactgcatcctttcaggtctccaaggaacacgaagtttcctccctgtcatgagagacacgaagtgaacttagtgttgggagacggaggttggatggccctcaggggctgacccacagggtgctggactttgggatatagcagagagagcttggcacgacttattactccaggccgtagaatcctggaaaagagctaccatgcagcccacacctggtcaactggaggaccaccttagtggaaaggggacaatctgggcctctggcctgccatgtgcacaagcataacaattggttttatttaatgtcaaatggaatatttgatccattttaactaggcatttgcatcttggtatcctgtcttaattgataaagtttgttttaagtctttaacttctatgatcctctagtaaaatgaatgtatggttttaggaaattataaaaaccggttgggtcagtccgtccttgctctttagtggtccacaggacgttggaccaactatggcatgaaagctctacgtcagggggcaagactcctagttggcactggggtgtttattgaaatctccccggattaaatggtcctcgtttactaatgcccagtctgaggagagtcaggaggggcagagatacttttctgaagtagaaagctgtcttggaattggcaagtccccacagggtataacaaggcaagaattaaatgcaatagtttgaggtgaaattgatttgattatgttaataactatatggtcaacaatagaatgaggaaagaagaaagagtaatagagtagatgaaaagagttacatttttcttagctttagtttggtagggttttcccctgggactatggcccccacctctggagggggtggcgctttcttgacttgggtgtgatgagtccatctttttttttttctgtaaaaacagcagtcttggtggttagcaggacaaggtagggtccttcccaggcgggctcaagtttttcttctttccaccctttgatgagaacgtgatcttcaggctggtgctgatttactggaaattctagcggtggtacatgtgctaaaagacttttagtttttgagagaaaggaaagtggaagataaaccaagtatataatttttaagaaactgaccttttgttttaaatgtggggaccttggcagtggactttatagtccttagtgtctttttactgagaaatttcctttagcacctatttttattagtttttaaaccaaagaaagccaaataccattttacatttaacaatgcttcttgtatgatttttataccagataagctaaatgttatgtttatattagtgtgttattaatgttaaacctaattttaataaaagcctgtagacatatttatctaatttttaatgtttgaccgtaagttacgattttatagactctttttaacctttcataatttttgctaaagagcaggttggtgctttaagaaaaacctgttatgcttttactttaatgtctagttcacagaaaaactggatgatacttctttaactttagcaaatatgtttatacacagaatttcctttacaattaatgttttaaaatttgcttaaaccttcaaaacaataaatttttaactttttaatgtaggtaaaaatgtacattcttatgcctccttataatccttttaccaaagatatattttacttttcttatacaccttgcacataaactgttgttttttttttttttcaatagttttacattcaggaggcctagttacttttaaattatacaacattttttgcataaattcttttttataacatttttctctttcttgacttttgcagacaattcttccacatgcctcaactttctgacttattacaaatatttctttctttaaacaaccagttaatttatttcaggacaagaatttaccatataatactctttttatataaattccacccgcccccttttttttcctttttttttttttttcccttaggatacttctgaactggtgagatgtgctcacaatgaggtttcctctaaaagttattctttttccccttttttttttttttttgttagcgaagcagttgccgctacagattgaatgcatttgggccatccgcgggttatggggttaaggatttttgataggaaggcctcagtgctttcgggatatgcccttgtttacactgacaacaaagtggtatcggactgttatagggttacggagaataccttcaattatcaattataggttttaaatttaccttggcttttaaagaatagggtacacttttttttaactacttgtatatctctttctttctttctctctttgactttgtctctctctttctgactttccttttgcctctgtctcttcctctctctgcctctctctttctctctctctccttgactccctctttgtctgttcctctctgtctcttcctctctctcttttcctctcttcctctctgtctctttcctctctctctctctgctgctctttccttgcctctgccatctgcttatgctgctgttctctcaaccgctgtgtgttgggggcgtggggtctaaaaccagctgtaaccaagtgtctatgtacgggaactggtctgggtgccctggcttacaggttactttgtgccatacctttgaaacaagggacctgtccaggcttccttctaatggccaatctacctctaatgctggccggtctatcttacacaaagttttaagttttcctagtgtcacagtactccatagtctctcttaaattctttttttgaaattttccaacatagttcctagtagggtgggcttatttgtgcctgacctatgcttctttgagacaaaataccatgctcactccacacgcacaccacaaaacaaaaaaatgggtaaaaagggcacacacacagttttgcagtttgcaccaaacaaaaatcaaaaccaaaatcagagtaaccagaaatctaagccaggtcaaaaccaaaaccaaagtatcaagcaatccaagtcaaatcaaaaacaaaaaccaaagtgccggtacaggcacgctgtgggtgatcaggccatgcttccactcaaatggagtgggcaagttctcaagaccagtcccgtcaagcaattcaaaccaagtcaaaaccaaaaccaaagtgcctgtacaggcacgccgtgggtgatcaggccacgcttccactcaaacggagtgagcaagtttcaaagaccagtcttaccaagtttcagatgtgcagactccaagtgcctgttccttccaggtgttcagccactgcattgatcctccacgggggcctgccacacactgctctggggggcgtcccaccgggacaaatgcctcatattcgttatatcctcaggggatgttacttctaatgtcacacgaggtgttctccctgtgttctatttcataatatcctagggcaattttacttttaatgacaccaggttgtacacattgtgacattattcatgatattctagaaagatgttgctcctaatgtcacaggggtgtaaaccctgtgatagtattcataatttcccaggggtctgtactcctaatgtcacagaagataacactctgtgacattattcataatattctagtgagatgatactcctaatgtcacagggggtgtacaccctgtgctattattcttactattctagggggatgttattcttattgtcacaggtgtgttccttctgtgatattattgaaaatatgctagcaggatattactactaatgtcacaatacatcttgtgatattattagtaatattctggggggatgttacccctaatgttacaggggtgtacaccgtgtgatattgttcccaatattgtagggggatgttactcctaatgtcacagggggtgtacacccttagatattatttgtaatcttatagagagatattatttgtaatatcttagagagatataactcctaatatcccagtgggtgtaccccatgtgtgtacaccctgtgatattatttgtaatatccatggtaaacattacttctagtatcccacagagggtacaccccgtgatatttttcataatatcgtagggagatattgcttctaataacacagtgggtgtacaccatgtgtgtacactctgtgatgtgatagcttatatcctagggagatattccttctaatatcccagtgagtggacaccctgtgatatcattcgtaatctcctaggtagatgctgctgctaatatcacagagggtgtgcccccagtgacattattcataatatcctagggagatgttactcctaatgtcacagggggagtgcgccctgttatattattcataatcttctatgggggggttacttttaaagtcacaggggtgtacaccctgtgatgttattcgtaatatcctaggaagaggttactcctaatatcacatgggttatcctaggaagaggttactcccaatatcacactcctaatatcacaccctgtgatagcattcggaatatccaaaagggacgttacttttaatgtcacatggggtgtacaccttttgagattattcataagatcctagggacatactacttcaaatatcacatgggtgtacacacatggtgtacacattatgtgtgaacacctactgtgatattattcataatatcctaggaaaatgggactcctaatatcacagtgagtgtacatactgtgatatcatttgtaatatcctaggggaatattactcctaaaccaaaggcgtgtgtaccctcatgatagtattcataatactctagggagatgttactcctaatgtcatatcacaggggtgcacaccctgtgatagtcacagtatatgagagggatattagcactgaagtcacaatgtgtgtacaccttgtgatattattcataatatcctacggggatgttactcctattgtcacagggggtgtgttcgctgcgatagtattcatagtctcctagacggatgttacacctaatgtcacagggtgtgtacatcttgttatattattcgcgatatcctaaaaagacattactcctcatgtcacaggggctgtataccctgtgatattattcgtaatatcctagtaagatattacttttaatgtcacagagggtgtacaccttttgaaattatttgtcacagtttcgtgggctgttactcctaatgtcacacggggtgcacactgaatgatattacttgtaatattctatagaactcttactcataaatcacaggtgttctacaccttgtaatgttattggtcatattctaggggactgttccatcaattaatgtcacccggggtgtacaccttgtgatattattcgtaatatcctagcaggatgttactactaatgtcacaatacgtatataccctctgatattattcattatatcctcacggattattactcctatgtcacacggggtgtactccctgtgatattattcggaatatcttagggggattttgcttttaatgtcacagggggtgtacacattgtgatattactcgtgatgttctagaaagatgttactcctaatgtcacagggggtgtacaccctgtgatattacacaggctaaccccctgtgacattattcgtaatattttagcaggatgatactcctaaagtcacaggaggtgtacgcccagtgatattattcagaatattccagggggatgttactcctaatgtcacaggtgtgtataccctgtgatattattcacaatatactagcgggatatgactactaatgtcaccatgtgtgtacaccttctgatattattcataatatcctgggaggatgttactcctaacatcacaggggtgtacaccctgtgttattattagtaatattctaaggggatttaacttttaaaatcacagggggtgtcaaccctgggatcttattcgtaatatcctaggaagatgttactcttaatgtcacatggggtatacagcctgggttattatttggaatatcctaaagggatgttatcttaatgtcatggggtgtgtacactccttgatattattcataatatcctaaggaggtattactttaaaaatcacagtgggtgtgcacacgtggtgtacatccgtgatattattcacaatatctgactgaggtatgacttttaatatcacagtgggtgtacaccctgtgatattatttgtaataccctagggagatgcgattcctaatgttacagtgggtgtacactctgtgatattatttgtaatgtcctaggaagatattactcctaataccaaagtgggtgtacaccatgtgtgtacactctgtgatataatccgtaatatcccagagagatattgttcccaatatcacagtgggtgttcaccctgtgatattattcataatatcctagagagatattattcctagtattacagcatgtgtacaccatgggtgaacaccctgtgatgttattcataatatcctagggggatattacccttaatatcacagtgggtgtacaccatgtgtttctattttgtgatgctattcatatgttagaaagttattagtcctagtgccacagtgggagtataccatgtgtgtaccctctgtgatgttatttgtaatatcctagggagatagttctcataacatcaccatgggtgtacatcatgtatgtacaccctgtgctgttattggttatgtcctgggtagatattactcctaatatcaccatgggtgcacaccatgggtgtacattctgtgatgttattcgtaatatcctagggaaatatcactccttatgtcatagtgggtgtacagcctgtgatattattggtaatgtccttgggatgtatttctcttgttatcgcagtgggtgtacaccctgtaatagtatttgtaatatcctagggagatattactgtataccctgtgatattgtttgtgacattttaggtagctgtttctcctaaagtcagagtgggtgtacaccctgtaatattcttcctaatatcacagtgggtgtacaccatgtgtggtattttttctaatatccagtgggggagaggatgatattgcttccaatatcacagaaggtgtacacccccctgtgatatggttcctaatatccagggaaggacaggatgacattattcccaatatcactggggggtgtaccaccccccgccgggatgttgttcttaatatccgggggtggagagaatgatattactcccaatatcacaggaagtgtacacaacctctgtttgatattgttggtaatattccggggggcagaggatgatattacctccaatatcgcagggtgtgtaaacaccctctgtgatattgttcctaatggcctgtgaaagagaaaatattactcccattatcgcacgggtgttcacccctgatgacattgttttctaatatccagggaaggagagtatgatattattcccaatatcacagggggtgtacacctttttgtgacattgagtctaatatccagggaaacagaggatgatattactcccaatgtcgcagagggtagacacccccctgggatattgttcctaatatcccaatggagagaggatgatattactcccaatatcaaaggaaatgtacaccacccctgcgatattgttcctaatatccagagaagaaaagaatgatattactcccaacagcgtaggaaatgtatacccgtgctgtgatatttttcccaatatctggggtgggggggaagaggatcatattacttccaatatcgcagggtgtgtacaccccctctgtgatcttgttgctaacatccaggtttagggaggacgacattactcccaatatcgcagggggagtacaccccccgtgacctagttagtaatttcctgggtggagaggatgatattactcccaatatcgcagggggtgtacacagccctgtgatattgctcctaatatccagagccaaagaggatgatatgactcttagtatcgcagagggtgtacacccctcctgtaatattgttcttaataccctgggagggagaggataagattacattgaatatcgcagggaatgtacaccctccccctctgagacccttcctaatatccaggggaagagaggataattttgctcccaatagcccagaggcagtacacctcccctgtgatattgttcctaatatccaacgggggagaggatgatacttctcccaatatcgcaggggtgttcacatccccagttacatttttcctaatatctaggggagagacaattatatgacagcaaatgtctcagggtctgtacatcccttcctgatattgttcctcatatccaggggggaagaggatgatgtcaaatatcaaagggggtgtacaccccccaccacgatattgttcttaatattcatgaggggaacgatgatgttactctgaatgtcgcaggggtttttcacaccccctgtgatattgttgctgatatccacagtgggagaaaataatattacttccaatattgcaggtggtgtataccccacctgaaatattgcactgaaaatccaaagagggagaggatggtattaataccaatatcgaagtgtgtgtacacgccccttgtgatatggttttcaatatccagggggcgggaggatgatattagtcccaacatcacagagagtgtacactacccctgtgatattgtccctaacttccagaggggagaggatgatatcactcccaatatctcagaagtggtacatcccccgtgatattgttcgtcatatccacagaggcacaggatgacattacattgaatttcgcgacaggcgtacacgcacactgtgatattgttcctaatatccaagaagggagaggatgatattactcccaataaagcagtgggtatacattacccctgtgttattgtctctaatatctggggacggggggcgggggagaggataacattccctcaaatttggcaggtggtttgacgccccttgtggaattgtttttaatatccagcggggaagacagtaataccattttggatagtccgatttatccgccccacctttccggaactctgagaccaggaggcggcatgcggtttccatgtgatccccgatacctttgccatcttctgtactgtcagccacaaacgcaggcccgttatctgagctgatccgtaagggcagtcccaatctaggaatcagatctcgaagaagcagacgggttacttcaggagctttctcagttcgtgttggataagcctccacccacccagagtaggtacgcccaagaactagtaaatacttgttacctccacactttggcatctctgtgaagtctacctggagatcttcaaagggggctgctccataagcttgtatgccgggcggaacggctggcacttgcctcgcattacgctgtcggcagataacacaccgctgcgtcaccgttttggcaagtgctgacaaatgcgagacgtagaaataccggcctaacaacttttccagttgactcctgacctacatggcattcgaaacatgagtatacagaagtctttggtaattcaggatcactgatgagtaaaacaagataggagttgaagcttatctttgtttaaaaaatcctttggtcttgggataacaagataatgtaaatatggcttaaaggagaatcatttcaaaaacaaagcaaaacaaggaaatgaaaaataaaatttatggcctggcacagcggctcacgcctgtagtcccagcactttgggaggccaaggcgggcagatcacgaggttaggagatcgagaccagcctgaccaacatggtgaaaccccgtctctactaaaaatacaaaaattagccaggtgtggtggcaagggcctataatcccagctacttgggagcctgaggcaggagaattgcttgaacccgggaggcagaggttgcagtgagctgggatcgccccactgcacactccagcctgggcagcggagtgagactccgcctgaaaaaaaaaaaaaaaaaaacaagtaattatccgggcctggtggcgggtgcctgtaaccccatctactcgggaggctgagccaggagaatggcttgaacctgggaggcagaggttgcagtgagatgagattgtgccactgcactgcagcctgggtgacagagccagactccgtctcagaaaagaaaaagaaaaagaaaattttaaaaatccttaagcgtgacaagcttcaaaaacaaaaaaagagtcgaaaatttaaaaaaggaatctttgtataaatagaaaaaatgattttcggaggacttcaaaaactttttttctaaatcttatattgcttttagaattatctttcctcattgaaaaactttttttttttttttttttttaatatgtaactagtgaaactgtcccccagggttaacaagaattcatacctggttctggacagaaatacagttctaactgtgaaaggaaagtcagtcgcaggaccccacgctgcctcaggcaaacctgcctcaaactttattcctaagcaagattgctacgaagataacaggaagctacctaccttcctcaccatttcccccacaaggaaattccttgagggcctcaagatctttaccttaaaacagttcttttgaatttcacctggcaaggtaaattggtagctcatcttcacaggtgtgggacaaaggacagaattcagtcagccctctgctgagctgcgacaaacgtatatctgattgcttcctctgccctattgtttatttatttatttattacttttggcttatttctccaagacaaatgccctattgtttatgcaaaaatgtagattcactgagccagactaaggcgtaagtgactattcctctacccgcctctcacatgtaaattgtgtattcagtgaaaggctgttcaaggactcaaaagaatgcaaccttttgaccaggcacagtgtctcctgtctgcaatcccagcaatttgggaagcccaggtgggtggctcccttcaggccagaaattcaagaccagcctggccaacatgaggaaaccctgtctctactaaaaatacaaaattagccgggtgtggtggcgcatgcctgtaatcccagctactggggaggctgaggcaggagaatcccttggacccgggaggccgaggttgcagtgagcaaagatggcgccattgcactccagcccgggcaacagagagagactccatcttaaaaaaaaaaaatacaatgttgtgtctcgtttcctatgacctggaagcccccactttgagttgtcctgcctttctagactgaaccaatgtacaccttacacatattgattgacgtttcacgtctttttcttttttgtttcttttctattgtttctaaccctcagtattcatatcatgtctctctaaaacgtaaacaccaagctatgccctgatcacgtggggcacatatcctcaggacctcgtgaggctgtgtctcaggcacgtccttaaatcttggcaaaatatccagcctggacaacatggtgaaacctcgtctctactaaaaatacaaaaattagccgggcgtggtggtgcacgcctgtaatcctacctactcaggaggctgaggcaggagaatcgcttgagcttgggagaaggaggttgcagtgagctgagagggcaccactgcactccagccggggcgagagagagagagactctgtcttaaaaaaaaaaaaaaaaggaaaccttggcaaaataaattttctaaattaattgagacctgcctcagatacttttgggttcttgtaactaagcattcatcaggctgcactttagcccactttcttgtaactgaaagtcccctagccatagatactgacaatttgcacccctattgttcccacagataggatctctgacgttagaatcataaggctttcgtttaagaattgcttaagatgtaggccgggtgtggtggctcatgcctgtactcccagcactttgggagaatgaggtgggtgggtcacttgaggtcaggagtttgagaccagcctggccaatatggtgaaaccccgtctctactgaaaatacaaaattagctgggtgtggtggcacgtgcgtgtaatcctagctactcaggaggctgaggcaggagaatcgattgaacctgggaggcggaggttgtggtgagccaagattgcaccattgcactccagcctgggcaacaagagcaaaactctgtctcaaaaaaaaaggggggggtggggggctgggcgcggtggctcacgcctgtaatcccagcactttgggaggccaaggtgggcgggtcacgagctcaggagatcgagaccatcctggctaacacggtgaaaccccgtctctactaaaatacaaaaagccaggcgtggtggcgggcacctgtagtcccagctactcgggaggctgaggcaggagaatggcatgaacccaggaggcggagcttgcaatgagccactgcactccagcctgggggacagagcaagattccgtctcaaaaaaaaaaaaaagaattgcttaagatgttttccagattctgaattccagcagaatggctgacactagacagtttaaagccccttcgcagagtaaccaagtcaacatgagaatccaggtgtctgtctccaacctgtgcttttcgaccaatcagtgatgcccacaccttggtccacttcaaacctcttaagatccccagccccagactcctgagggaagctgctttgaggtgtcctctcctctaggcattccgcagcattaggacgacacctctctctctctgctggaaccctccatcggtgtttggacttgtgcatcaggcaaccgacctgttaaggtcacagcagcaaaagctgagctaatggtgttatttccatcaagctgttaagcctgtaaagatctttatcaggcgagactttgtggtcctgtcataccgaaagtagtgcaagggtacacccctctgtagccgaccagaatatgccactccaaatgtgcctcttggcatagaattattattattattattattattcttattttttatgagatggagtcttgctctgtatgcccaggctagagtgcaatggcgtgatcttggctcaccgcaatctccgcctcctgggtccaagcgattctcctgtctcagcctcccaagtagctgggattacaggcacgcaccaccacgcccggctattttgtatttttagtagagacagggtctctccatgttgatcaggctggtctcgaactcctgatctcaggtgatccacctgcctcggcctcccaaagtgctgggattacaggcgtgagccatcacgcctggcccggcatagaattattttgagctgattattttgacagccagcagacacaggagtcctggatacagtgtataaattacccttttgtaagggaaatctacatttataaaggaatctccattggtcccggcatcttcctcttcatatcaggaggaggaggattctaaatcacaagagacatcatccgcataacaaaccctgcccttgttgactccactcctctcctgagggtcactttcccgtaccctgcctcctcatcttcttcttttgttttagcagaagatggtatttaagcccaaattcttttttttttttttccttttgagacattgtcttgtctctgttaccaggctggagtgcagtggtgtgatcttggctcatcacaaccaccacctcccaggttcaagcaattctcccgcctcagcctctcgagaagctgggattacaggcatgtgccaccacgcctggttaatttttgtatttttagtagagacggggtttcaccatgttggccaggctggtctcgaactcctgacctcaggtgatccacccacctcggcctcctgaagtactgggattataggcatgagccaccacgaccagcctcaaaattctttttttaagacagggtctcactttgtcgcccaggttggagtgcagtgacgcgaacacagctcactgcggcctcccaggctcaagcaatcctcctacctcagcctccctagtagctcagactacaggtgtgcaccaccacgccccactaactttctttttgtatgttttatagagatggagttttgccatgttgcccaggctggtctggaactcctcagctcaagcgatccacttgcctcagcctcccaaaatataaccacccaacgagttcaccttgcctgctgtctagacagctgatttatcaacacaggggaactgaaatagagaaagagcaatttaccagggccagctatgtgggagaccagagttttattattactcggattactcaaaattacccaagaatttcgggatcagaggtgttttttgtttgtttgtttgtttgtttgggacagagtttcactctgtcacccaggctggagtgcaatggttcgatctcggcaacctctgcctcctgggttcaagcaattctcccgcctcagcctcctaagtagctgggatacaggcacaccatcaccatgcctggctaatttttgtatttttgtagagacggggtttcgccatgttggccaggctggtcttgagttcctgacttcaggtgatccacccacctcggcctcccaaagtgctgggattacaggcatgagccactgcgcctggccttttttttttttttttgagatggagtgttgctctgtcccccaggctgtagtgcaatggcgtgatctcggctcactgcaacctccacctcccagcttcaagtgatcctcctgcctcagcctcccgagtagttgggattacaggcaccaaccaccatgcccagctaatttttttattttagtagagacgaggtttcgccatattgggcaggctgataatttttgtatttttagttgagacggggtttcaccatgttggccaggctagtcttgaactcctgacctcaagtgatctacatgcctcagcctcccaaagtgttgggattacaggcatgagccaccgtgcccgactggggatcagagtttttgttttgttttttctttttttgagatggagtcttgctttgtcacccaggctggagtgcagtggcatgatcttggctcactgcaaactccgcctcctgggttcacaccattctcctgcctcagcctccaaagtggctgggactacagacgcccaccactatgcccggctcattttttgtatttttagtagagacggggtttcaccgtgttagccagaacggtctccatctcctgacctcgtgatctgcccgcctcggcctcccaaagtgctgggattacaggcgtgagccactgtgcctggcccagagtttttaaggataatttggtgggtagggagccgttgggtcaggagtgctgatttgtcaggtcggagatgaaattacaggaagttgaggctgtcctcttgggctgacttggttcctgggagggggtcagaagaccccatgagccagtttatcggtaggagtggtgtcagctgatccatcgagtgcagggtctgcaaaatatctcaagcgctgatctgaggtttgacagtagtgatgtgatccctaggagcaattttgcagcctccagctgcaagactcctaaacaataatttctaattttgtggctaatttgttagtcctgcaaaggcaatctagtccccaggtaggaaggggatgtgtttagggaaagggctctatcgtctttgtttcaaagctaaaccataaactaagttcctcccagagttagttcggcctccacccaggaacaaacaaggacagcttggaggttagaagcaagatggacttagttaggccagatgtctttcactgtaatgattgcctcacttataatttttgcaaaggtggtttcaaaagggctgggatagaagcccaaattctatgtcacctctttaaatttactcatccctgagtttctccattatccctgagagatacatgctaataaacatccatctttcccctgttaatttgtcttttgtagcagggtccccagtgagaacctggaagggtagaataaaatgagcaattttccttcccctacacagttaaaagagaagagctctggcgggatgaagacctgggcctggagcctgtcttgaacacgcccagtggttttctcccatgtaaaaggagctggagagatttctcccatctctagaattccatgaatgcattctgttccttaatctttccactgatcctgactgataattgcacatacacaaaagtgcacttacttgtagatgctaggatatgtggaggtagggacagtattcctagtatatgtaagaagggtatatgtatccagtatcctagtatatgtatccagtcacacatgcaggaagcaagagaggcagctgacacggccaccaagggaggcaccctgtccagaccaagcccacaagcttctctttcttttttcttttcttttcttttctcccttcccttcccttcccctcccctcccctcccctcccctcccctcccctcccctcccctcccctcccctcccctcccctcccctcccttcccttcccttcccttctcttcgacggaatcttgctctgtcgcccaggctggagtgcagtggtgtgatcttggctcactgcaaaatccgcctcccagtttcaagcaattctctgcctcagcctccagagtagctggtgcccatcgccatgcccagctaatttttgtgtaaaaattggccccgcaagcttctttctatcctcaatgaaaatacgttgtggccgggcgtggtggctcacgcctgtaatcccagcactttgggaggccacagtgggtggatcacctgaggtcaggagttcaagaccatcctggccaacatggtgaaaccccatctctactaaaaatacaaaaattagctggctgtgatggtgcatgcctgtaatcctagctcttcaggatgctaaggcaggagaatagctggaacctgggagatggaggttgcagtgagcagagatcaggacattgcactccaccctgggtgacaagatcaaaactccatcttaaaaaaaaaaaaaagaaagacagaaaagaaaatatgtagtagaaacagcaactgtgttggctggacacagtggcacatacctgtaatccgagcactctgggaggctgaggcaggcagattgcctgagctcaggagttggagaccagcctgggcaacatggcaaaacccatctcttttaaaaatagaaaggaaagggccaggcgtggtggatcactcgtgtagtcccagcactttggtaggccaaggctggtggatcacctgaggtcaggagtttgagaccagcctaagcaacatggtgaaaccctatctctactaaaaataccaaaattatctgggtgtggtggcatgtgcctgtaatcccagctacttaggaggctgagacaggagaatcgcttgaacctgggaggcggaggttgcagtgagctgagatcatgcccctgcactccaacctgggtgacagagggagactccgtctcaaaaaaaaaaaaaaaaaaaaaaaagaaaagaaagaaagaaaaaaaaaaggaacagtaactgtgttctcaaatatctcacgagatggtaaacgttcatttcagcacaattaggaaaacagccaagaatgaggggcaagaagagaaaggcgttttttcagcttgatgctccttttcgtgctaactgtgcactgcctgggcacagaaggcagcgtgccagctcgcctcccttgcctctgggcattcctctgtagcctggagaggggcccaccatccctcccgtccctccctcttctctcccctaccccactcctcatccaagctgagagggggcacattccctccagtgagggtccaggcccggggggcctgtgcaggcaggaaagcaacctgtccacatagcactgctgtgggcaggtaggaagcaggactgcggggactaggaggccccttctctgtgcctgattttagctgcacagtcccgccaggaagggccaatggtgagcggtcactgggaccatgggccttccaggattgtcctactgcggccttggtgtccacagtgggaaagcaggcaacggtgccatgtgtgggtaaatgtcactaaagcatatgccattgtgagggtccagagacaggaatgcatcctgcattagtcagggttctccagagaaacagaaccgataggatggagatagatgtacatagacggatagtgagagagggagagatttattttaagaatcgagactggcaagtctgaaatttgcagggcagtctggaaattctagcaagagatgctgctggcggtgcggcgtgagtcccaattcaaaggcagtgtggaggcagaattccttccttcttagggaacctcagtcttttctctgaaggccttaaatggatgcatgaggcccacgcacattatggagggtaacgtgcttcactgaaatctacttaggaaaatgttaatcccatctaaaaacatcttcacagacacatccagggtgctctgtgaccactgagccaggcaccatagcctagccacattgacacataaaattaaccagcccaggtcccaaagctcaggaagtatcatcttgtcccagggcaggtaaccccatatccagtgccacccgtacaccccaccgtattggagttcctgctcatcgagcttcctcacctgtctgagcacacctggctcaggtgcagccgttgtccatcagggacccggagccttctcttgctgtctccatccaggctccccaaggctttggtctcttccattgctgacttgccctgttgagctggggctcatcatatttctctattgttgctgtagtttttgtgtgtggaatttttttatttttgtagagacgggtcttactatgttgtccaggctggtcccaaactcctggcctcaagcagtcctcctgccttggcctcccgaagtgctaggactacaagtgtgagccatggagcccaaccagttaatcatgtttcaactgttcattgacctcattgagaaattacatatttgggctgggcgcagtggctcatgcctgtaatccctacattttgggaggccaaggtaggaggatcccctgaacccaggagttcaagaccaacctgggcaacatgatgaaatcgtgtctctacaaaaaaatacaaaaattagctgggcatggtggcacacatctgcagtcccagctactcttgaggctaaggtgggagggtcacctgaatgcagggaggatgaggctgcagtgagcagagatcctgccactgcactgcagtctgggcaacaaagtgagaccctgtctcaaaaaagaaaaaaaaatctaatttcaattaaaataaaattaaaaagaaggccagtttcgatggctcatgcctgtaatcccagcagtttgggaagctgaggcaggtggattatttgaggtcaggagttcaagaccagcctggtcaacatggtgaaaccccatctctacaaaaaatgcaaaaattagcccattggtagtggcatatgcctgtaatcccaggtactcgggaggctgaggcaggagaatcatttgagcttgggaggcagaggttgcagtgagctgagatcatgccactgcactccattctgggtgacagagtgagaccctgtttcaaaaaaaaaaagaaaattatagctttgaagaattggcttttcttccccccgagacggagtcttgctttgtcgcccaggctggagtgcagtggcgcgatctcggctcactgcaagctctgcctcccaggttcacgccattctcctgtctcagcctcccgagtagctgggactacaggcgcccgccaccacgcccagctaattttttctcttttttttgtatttttagtagagacggggtttcaccgtgttagccaggatggtttcgatctcctgaccttgtgatctgcctgtctcggcctcccaaagtgctgggattacaggtgtgagccactgcgccccgctgggctttttttttttttttgagacagggtctcagctttttagtctgtcacctaaccaggagtgcaatggtgtgatctgcgctcactacaacctgtgccccccggggctcaagcaatcctcccatctcagcctcccaagtagctgggaccacaggtatgcaccaccacacccagctattttttaaattttgttttgttttgttttgttttgagatagagtgtctctctgtcacccaggctggagtgcaatggtgagatctcggctcactgcaacctccgcctcccaggttcaagtaattttcctgccttggcctccccagtagctgggaatgcaggcacgtgctaccatacctggctaattttttttttttttttttgagatggagtcttgctttgttgtccaggctggagtgcaatggcatgatctcagctcactgcaacctccacctcccaggttcaagtgattctcctgcctcagcctcccgagtagctgggactacaggtgtgtgccaacacgtctggctaatttttttgtttttgtttttcttgagacagagtctcactctgttgtccaggctagagtgcagtggcgtgatctcggcttactgcaacctccgtctcccgggttcaaatgattctcctgcctcagcctcctgagcagctgggattacaggcatgtgccaccacgcccagctaatttttgtatttttacaaacatggggtttcactcctgacctcatgatctgtctgcctcagcctcccaaagtgttggaattacaggcatgagccaccgcacccggccaatttttgtatttttagtagagatggggtttcaccatgttggccaggctggtcttgaacttctgacctcaggtgatccacccacctcagcctcccaaagtgctgggattacaggagtgagccactgtgcccagccctagaattggcttttatcagttaataaacttgagtgatttggagactaattagagtgcacactaatacaatatttgaatagttccagctgggcgcagtggcttatgcctataatcccagcactttgggaggccgaggtgggtggatcacctgaggtcaggagttcgagaccagcctgaccaacgtggagaaatcccatctcaactaaaaatacaaaattacccgagtgtggtggcacatgcttgtattcccagctactcgggaggctgaggcaggagaatcgcttgaacccaggaagcggaggttgtggtgagctaagatcgcgccattgcactccagcctggacagcaagagggaaactctgtttcaaaaaagaaaaaaatattgaacagttcctggcatgagatgtatgagacattggagcagtgtgtgagaatgaactctatgcaaaatcaaaagcagatgagggccaggcgtggtggctcaggcctgtaatccccgcactttgggaggccgaggcgagtggatcacctgaggtcagtcaggagttcaagaccagcctggctaacatggcaaaaccctgtctctactaaaaatgcaaaaattagctaggcgtggtggtgggcacctgtaatcccagctactcaggaggctgagtcaggagaattgcttgaacccaggaagcggaggctacagcgagccgaaatcagcgccctagttttcagtggcttctcgttcatttttctcagtgaagcctctcagatcctaatcatcctttaagaacaactcaagttcctccagtgtcattttcaaatactcccccatgtaccgtagctctggtgtgtgctgtgccccatctgggttactgctacctttattccctgtgcctcacaagtgagtgctgggattacaggcgtgtgccaccacgcccggctaattttttgtatttttagtagagacggagtttcaccatcttggccaggctggtcttgaactcctgacctcatgatccaccctcctcggcctcccaaagtgctgggattacaggcgtgagccatcgtgcccggcctactgcaacctgttttattagcaaggtctttatgacttgtattgtatcttgtcctgacctcttataccatcctgtgactttgaatgccttaactgtctgggaatgcagcccagtaggtttcagcctcatttcacccagctcctattcaagatggagttggtcttcttcatacgcctcacgtatttctcctttttttttttttttttttttttttgcgacagggtcttactctgttgcccaggcttcagtgcagtggcatgctctcaagccttccaagtagctgggactactggtgtgcaccatgacacctgctagttacaaatttttttttgcggctgggtgcagtggctcacgcctgtaatcccagcactttgggaggccgagatgggcggatcacgaggtcaggagatcgagaccatcctggctaacacggtgaaaccccgtctctactaaacaaaatacaaaaaactagccgggcgcggtggcgggcgcctgtagtcccagctactcgggaggctgaggcaggagaatggtgtgaacccaggatgcggagcttgcagtgagccgagatggcgccactgcactccagcctgggcgacagagcaagactcggtcacaaaaaaaaaaatttttttcttcttttgtagagaccaggatgggtgtgtgcagggggcagtgggggggtctcaccatattgcccacactagtctcaaactcctggcctcacgcctcctgaagtgctgggattgcaggaatgagccactgcacccagtctagtcatgtctttctttttctttttttgagacagagtctcgctctataccccaggctggagtgcagtggcatgatctcggctgactgcaatctctgtctcctggattcaagcaattctcatgcctctgtgataccctaccttgttttaacctgagtgaccctctcctaggagagagagagccagacagactccattttagtttcttcattggcagccccctttcacctccctcccttaaggcgtagctagtgtaaactgactctaagcacgtccaggaatgcacctactgataagatagtgaggcaagccgcactagcagctcctggggatgagcacggtggatggcacccaaaacccctgcatttatctctttgtgatagtttaagcccctgcacctggaactgtttatttttttaactgcatttgtaaccaattaattttttaattttttgccagttctgcttctgtaaaaattgtttcagctaaaatccccctcccctatttagaccatggtataaaaacaaaactagccccttcctcggggccgagagaattttgagcgttagctgcctcttggttgccggctaataaaggactctttaatttgtctcaaagtgtggcgtttctctataactcgcttggtcacaacacctcagcctcccaagtagctgggattacaggcgcctgccaccacacccagctaatttttgtattttttttttttttttttgagacagagttttgctcttgttgcccagaatagaacgcagtggcgcaatctcggctcactgcaacctccaccttctgatttcaagtgactctcctgcctcagcctcccaagtagctgggattacaggcgcctgccaccatgcccatctaatttttttgtatttttagtagagaaggggtttcaccatgttggtcaggctggtctcaaactgctaacctcgtgattcacccgcttcggccttccaaagtgctgggattacaggcgtgagccactgatcctggcaatttttgtatttttagtagaatcggggtttcaccatgttgcccaggccaagagtttgagaccagcctggtcagcaaggtgaaatcccgcctctactaaaaatacaaaaattagctgggcatggtggcgggcacctgtaatctgagctacttgggaggctgaggtagaagaattgcttgaacccagcaggcagaggctgcagtgagccaagatcatgctagtgcacttcagcctgggtgatatagcaagactccatctcaaaaaaaaaaaaattaacaaatattatagaaaacatgttgtaaagaaaatagaatggctgcttatttgaattaaaatgtacctgtttttttttctttctttttttttttgagacggagtcttgctctttcgcccaggctggagtgcagtggcgcgatctctgctcactgcaagctctgcctcctgggttcacgccattctcctgcctcagcctcccgagtagctgggactacaggcgtctgccaccacgcccggctaattttttgtatttttagtagagagggggtttcaccctgttagccaggatggtctcgatctcctgacctcgtgatccgcccacctcggcctcccaaagtgctgggattacaggcgtgagccactgagcccggtctgtttttttttctttagaaaccacttcggtgctcaacaccgggaagagggcccccatggccacacaggtgtggttggaggcaaaggtggattcacagggaagcaaatgagtcttcaccccctctaaagccccatacctacctcactttgaattattttcctaaagactcctcacagtatgcaagtttcagggcccagcaaactttgcccatccctggaggaggagactactgatagtgcatctgtcaggggcatttgaaccaaagcgactccatcttgaatagcgactgggtaaaataagactgagacctattgggctgcgtttccaggaggttaaggcattcttagtcacagggagagataggaggacacaagacacaggtcacaaagaccttgctgataaaacaggtaaagaagccggccaaatcccaccaaaaccaagatgaggatgaaagtgactgctggtcgtcctcactgctcattatatgctaattataatacattagcatgctaaaagacactcccaccactgtcaggacagtttacaaatgccatggcaatggcaggaggttaccctatatggcctaaaaaggggaggaaccctcagttcccacccctgttcaggaaacctcatgaataacccaccctgtgtttagcatataatcaagagctaacaatatatgtataagctgccgggggaggaaggcagggcaggaaagaaaaacaagcaagcaaacaaacaaaaagtataagcaactgagcagccacgccactggtgggcctatggagtagctgttcttttattcctttgctttcttaataaacttgctttcagtttatggacttgccctgagttctttcttgctcaagatccaagaatcccctcttggggtctggatcaagaccccctttctggcaacacatcccggcctttcccccttttctgaagacagacttcagaaatgaagaaaaagaagggtggccgctcatggtgggtgaaacggcaaagcagctggcagagaaggcacctagctgatgaccccagagtcttctgggcccagagtgggatggcagggcctgggcttctgtctgccctggacttgctgcagctgcttcctgggctctgggtgaccatgcgctcaggtcctcctgtggaactcctgctgtctcacaggccagatgcaaataaatgaaagcttcagaccgggggcaggtgtaggtgtggccagtgagccccgggctgcttccaggggcctgaacagcatgtcacagggcccctgcccctgctgagaagggcccaggcttggggtaaggttctgctgtcactgccttgaaattcttcactgtaatttctgagccagggactttgtcttactggaatggggtctcaatccagatcccaagagagggttcttggagtttacacaagaaagaattcagggagaatccacagagtaaagtgaaagtgagtttgttagagaagtaaataaaccaaagaatggctactccataggcagagcagccccaagggctgctggttggctatttttatggtccttttttttttccctagaatccgttcctgaattatattggttatttcttgatcacgtgctaaacaaggggtggattattcatgagttttctgggaaagtggtggggaattcccagaacttaggcttcctcttccatttatttatttatttattggagatggagtcttgctcgttgcccaggctggagtgcaatggcgtgatctcggctcactgcaacctttgcttcccaggttcaagcgattctcctgcctcagcctcccaagtagctgggactacaggtgtatgccaccacgcctgcttaattttttggtatttttagtagagatggggtttcaccatattggccatgctggtctcaactcctgacctcaagtaatctgcccgccttggcctccccaaagtgctgggattactggcgtgagccactgcgcccgaccccttttaggcaatgtagggtatcttccaaacgttgccatggcatttgaaaactgtcatggcgctggcgagagtgtgttttaccaagctcatatattataattagtgtataatcagcagtgaggaaggccacaggtcactttccccgccatcttggttttggtgggatttggccggcttctttactgcatcctgttttatcagcaggatccttgtgacctgtgtcttgttccgacctcctatctcatccgattactaagaacgccttaactcctggggggtgcggcccagcaggtctcagcttcagtttacccagcccatgtggagtctctctgttccaacacctattgacacttgcatctggatcttgcactaggctctgcagattatgctcagtcttgaatactgagctttttttgtccccttgaacttccctccttgggcaagtatctcagggcctccctcttgcccaccctgctgcttcccatctttctgaaagaggcggctctgcagctgcacagcacttggccaagacctcctggcggtgtggagctctgaagacacaggagggatgtcctccgagctgttcatgcctagacctacccccaggctccctctagcaatcagctccagtcctgggcctgtctgccttccgggaggagtgggggcccacagagctgcccttcccgcgctgtgtatggactcaaggcactgatggccttcggtgggccactgcataaatggatgtttctgcagtattgaaggccagtcaggcaaaccgtgtgctttcctacgcagtggggaatgtgtcgccctttccttacatcttggagaccaaagccaccatctgcacttgtgggtacattgtggcagtggtcggttagggtggtctttcaaagcagtttgaaatgcagacacttgtgggcgtcccctaaggcaggtgccctttacctggaggccgcattggtcacctagacccgcaaggctcacctgggccggaaggtgtggtcaagcgaggccaagtagcccagaggccacccctaagcacctgtggacatcatgagtccttgctggggtcctcacagagggaagacagcccccagggtaaagcctcaggtgctaagcactcgcgctgccgcagggggggaggcacgtgagcatccactgtgccgcccaggacgggcccacccgggctccagagcctggggaggaaggctgcgaggctcccacgggcttacattcaaaccgggcacacacagaacggaggccttcggctacgggacgcccggcggtggggttacggatggtacagccctccctccccgcctgctcgaggcaaatggtttcgcccggctacacacacctctcctgggcggcaaccgagggcgcggagggggcaagacgtgcgctgaggccacgcccctactgcatagtcataaggcgggaggctctgccttcggggcggggcagacagctcctcgcgctcgggcgcggccggttgggggcacggcctagctccgggtgcgggcggggctggaggcggggccggccaccgcccggttcccgccctcgctctcctcccccagcgatcaggccccgccccgcgcccgccgccgcgcagggaggggcggggcccgtctccggcaggccccgccccctctctgaatattgatgcggcgcgcgtcggcgtcgccctcctcccattgagcgaggctgtgtcgcgtggcccagcgtcggcgtgacggttggacgcgggcgcggcactgcgggtcccgattgctgcagccgcttgtcagtgtgatgaagattggcacccaggtaagctgtcactcaaccgctccgccgccgccgccgccgctctcgccgccgccgtccctatcaatcacaccggcccgcggccgccgcccgccgccgccgctgccgcccgggtctggagggccggcgctgccctcgagggcccgcatttgacccgccgcccggggcagggggcggggagggggcgcgggtgggggaggggagcgggcacccgcgggggagggggcgccttcagcccaaccggcgcgggggcgcgcccagttggtttcttagtgtgggttgagggacgcggaaatttctggaaggcgccgccgccgccgcgctgggcctgatcgaagcgcgcgctcctaaccgtccctttcggagtgcggcgcgcgccccggcgcggggcgggggcgcgcggagcccggcgcgggcggggcggcgggcgtgagggtcgggggcgcgcggcggggcggggccggggcgggcggcgcgcgtggggccggtcgggtccgcggcctcgcggagtcctcagggccggcggggctgctcggagggtgcggggcgcgcggcggcgcaggcgggaagatggcggccgcgaccccggccccggcctcggccgtggcgagcgggtgggtcggggtcctgggggcggtgggcgtgatggggctcgtggccctcagccgggcgccggcgcgggagcagcccagggccgctcgctgacggcagtgtttggggccgggtgctggggaagcggttccggcgtcccgggaattggtgggaagagccgcttctgtcacacgggtcgtggtaatggatgacaggaagtgccgggcagggtctgggcgccctgtgggtttgcaccttccttgtgagggaaatcgtgtcacttaacgaaaaatgaagaaacgcggagtctgctttatgtcatcctcgtggctctcgaaatgccttatttggacagtggctctgcgacgggaccagttagggcctccgttccgatggcggattcctgacgggaggcccgagggtccgggaatggcggcgtcctgaggtcgggcccagggcaggccaggctgagcgccacggcggggccgcagccctggggggtgttccacctgtgtgtggggttctcttccaactctacgagagtttgctttttaaaacagtagatgatttttccttaggaagtggttcctcttcaggatgaaagaaacccccagctttagttaggtctactttcatgatttttcctggcatactgaaaaataggctttctctaaacataaggaagaatcgaggtgaaatgtgaacctctgccagtatagttattggtgatgctcttgcatttagtcataatttggaagatggcaggctgaccccaatgagcctttcatcactctgcttaatttacttagagtgatttgtgaatcctgtccttgtacacaggcgtacctcagataattcgagttctaatccagaccaccgcagtaaaataagtattgcagtaaagcaagtgacgcaacagttttaggtttttcagtgcatatgaaagttgtaattacagtatactacttaaagtgtgcaatagcaagcattatatctataaaaatgtgcttacgttaattaaaaaatattttagtgctaaaaatactaatgatcatctgagcctttagtgagtcctgcttgttttatactttgacaatctggcctcagtgtggatggctgctgactgatcagggtggtggtggctgtgtcagttacttaaaataagacaacagtgaaatttactgcattgatggactcctcctttcatgaaagacttctttgtagcatgtgatgctgttttgatagcattttaaccacagtgaaaattctttcaaagttggaggctattctcaaactctgccactgctatccactaagttgatgtgatattccaaatgttttgttgtcatttccacaatgtgcacagcgtcttcactaggaataaattccatttcaagaaaccactttctttgctcatccgtaagaagcaactgttcattatttccaccacatctgcagttccttcctccactgaagtcttgaactcctccaagtcatcataagggttagaatcaacttcttccaaactcctgttaatgttatttgacttccttccatgaatcatgaatggcatctagaatggcagattctttccagaaggttttcagtttactttgcccagattcatgcgaggaatcactaccacagctatagccttacaaaatgtatttcttaaataattaagacttgaaagtcaagattactccttggatccatagctgcagaatggatgtggtgttagcagacatgaagacagcattcatctccttgtgtacatctccatcagagcccttgggtgactaggtacattgtcagtgaacggtaatattttgaaagaaatctttttctgagcagtggatctcaacagtgggtttaaaatattcagtaatgtgttattccatttccagagcacaggcaagagtagacgtaacataattcttcagaaccctaggattttcagaatggtcaaagaccactggcttcagcttaaagtcaccagtgacatttgcccctaacaagagagccagcttgccctttgaaactaagcactgagttctctctaggtatgaaagtcctagatgtcatctccttccaaaggaagtcttttgtctatattgaaaatctgctttttcgtctcgctgccttcatcaatgatcttagctagacctggataacctggtgttgcttttctgttaggtagcacttgctgcttcaccttgtactttcgtgttatggggacagcttctttccttaaacctcatgaaccagcctctgctgcttccaactttttttttttttttttttttttttttgagatggattttcactcttgttgcccaagctggagagcaatggcgtgatctcggctcactgcaacctccacctcccgggttcaagcgattctcctgcctcagcctccgtagtagctgggagtacaggcagctgccaccacatacagctaattttttgtatttttagtagagacgggctctactaaatgttagctaggctgggacttctgacctcaggtgatccacctgcctcagcctctcaaagtgctgggattacaggggtgagctgccgtgcctggctccaacttttcttctgcatcttcctcacctctctcagccttcatagaattgaagaaaacttgggcctggttctcgattaggcttcagtttaagggaatgttgtggctggtttgatctaatcagaccactcatactttccacatatcaccaataaggctgtttcactttctttccctccctccctctttttttgagactattgcccaggttggagtgcagtggtatgatcatggctcactgcaacctctgcctcctgggtgcaagcaattctcttgcctcaacctcccgagtagctgggataacaggtgtgcagcatgtgtccagctaatttttgtattattagtagaggtaaggtttcaccatgttgaccaggctggtctcgaactcctgacctcaagtgatccgcccgccttggcctcccaaagtgttgggattacaggtgtgagccaacggacctggccattttcttattcatgtgttcactggagtagcactttttaattgcctttaagttttcctttgttctgagaggtgatttaaaatttcaaaaatttgtgtatgtatttttttaatttcaaaaattggaaagaaacttctgctttgcatttacaacttggctaacttgtttttttcttttcttttctttttttttttttttttgagatggagtcgctctgtcgcccaggctagagtgcagtggcgcgatcttggctcactgcaacctctgcctcccgggttcaagtgattctcttgcctcagcctaccaagtagttgggactacagacgtgagccaccacgcccggctaatttttgtatttttagtagagacagggtttcgccgtattggccaggctggtcttgaactcctgacctcaaataatccacccaccttggcctcccagagtactgggattacaggcatgagccaccgcacccagcccttttttgtttttttttaaagagatgaagtctccctatgttatccaggcaggtctcaaactcctggcctcaagtggtcctcctgcctcagcctcaggcatgatccactgttcctggccttggctatgtttttgagagacagggtctcattctgttgctcaggttgggatgcagtggtgagatcatagctcactgcactcttgacctcttgggctaaagtggttctcccacctcagccccctgagtaactgggactacagggatgtgccagcatgcccagctaattttgaaaaagttttgtagaagtgaggtctcattatgttgcctcggctgtctcttaagttcctttccagaatggtgaatcctttcaagccgccttcctgcctcgtccttccgaagtgttgggattacccatatgaatcactgttcctgacctgaacatcaaagatcactgatcacagatccccgtaacagacataataatgacaaagtttgaaatagtgaagaattaccaaaatgtaacacagacacaaagtgagctcctgtttttggaaaattggcaccaataggcttgctttcttcatacagggttgccacagatcttcaacttgtgaaaaacatagtacctgctgagtgcaataaagcaaaacacaataaaaggtaaaatgaggtgcttatagccaggcgcagtggctgacgcctgtaatcccagcactttgggaggccgaggcgggtggatcacgaggtcaggagatcgagaccatcctggctaacactgtgaaaccccgtctctactaaatatacaaagaattagctgggcgtagtggcgggcacctgtattctcagccacttgggaggctaaggcaggagaatggcgtgaacccagggggcggagcttgcagtgagccgagatcgcgccactgcactccagcctgggtgacacagcgagactccatctcagaaaaaaagaaaaaagaaaaatgaggtgcttatagtctgttgaatctaaaatgcagcagtgtgttataccactacagatgctcccagtgccttctggcacgctgctttcttaccccatcagtgaaggatgcttttcacttcagacatttaaaagtgtgccttagaattgatgaaacatggtcagtgaagtatgacttgtttcaaagattaaccttctgcgcttatgatctaagtgccagcaggttctgtggtaatgatactgagtacaatgcattttgttgggattcctgtactctatatgtagttaacgtttctctggcagtaactttagaaaagtactacttgtgaggccaggtgcggtggctcacacctgtaatcctagcgctttgggaggccgaggtgggtggattgcctgaggtcaggagtttgagaccagcctggccaagatggggcaacccctgtctctactaaaaatgcaaaattagctgggtgtggtggcaggagcctgtatccccagctactcgggaggctgaggcaggagaatcacttgaaccaggaggtggaggttgcagtgagctgagatcgctccagtgcacttcaggctgggcgacagagcaagactccatgtccgaaaaaagagaaaaaaaaatactacttgtaaatagcagaaatagaaaggtgctacttatgagaagtaacatcctatttgcggcttacacttttgttgcaaattgttaaaagtgtctgaaactgtttagaaggacagcctgaaactgctaaagtgatgcaaagtatagactctggtgggagagggggcgtcttaaattttcacgtttgcttggcctctgggggcctcttaacagcactttaaaggaaataaatagatgaagaagagaacaaattattttgaaatacagttattaaaatactgtattgaaccaaattggtgatagtcccatttattagcttagtaaccggattgagctgtggctctggtaattcatttgggagtagtgacgagattttttgtgacactctaatgctttggaaaatacctgttgctgttcctgctaaaactccagggcttattgtctgcctttgtaattgaaggagtgctacatttcagctagaagtttttgccttttatcattcatgttcacaaataccaagttgatttactctcagcctatccatttgtaggaatatatggtgtcctttctttacttcctcaaatgattatattgatgacaaaagagacaaggaaataaaaacggcacagataggggaacccaaagcctaacagtgtgtgtccttggaggtgagggtgaaggaagtggctgcaggccctgggaagtaccatcttgcatccgtgtgcagcactgagtggatacctcatggttctgtcttgtgtacactgttcaggaggacatgtagagtggacatatcacatagaagaaggtcagtctggaaactgttaggagaagcactcaagggctgagaggcatggtccttggtggaaagagccagcaggcctggtgctggcggtgccctgctcgtgacagtgtgcaaagtctggagcctggcctgttcccgcccttggcagatggtagctccttgttttggattattagcccctgccggtttagttactgtttctggaagattcacatagaaggcagtgtggtaattcagtcaacgtgttgtctggcatgtggtataaaactcctgtttaaagctctgattctgaggccatgcctcagggacttgagaaggggacagagcagcttattttattttattatttattttatttaattttaattttattttattttgagatagggtctcactttttcacccaggctggagtgcagtggcacgatctcggcccactgcagccgggagcttctgggctcaagtaatcttcccgccacagcccccaaagtagctgggattacaggcacgtgtcatcacacccagctaattgtactgtttgccgtctgcgattgacgctggaatgattggctgttttagtcgggttctcagggtggcagggagcaggctgacttcaagttgggtgggtggtgagataggtggttcaggatcatgcagggataaagaaaacaggagtctatgggattcttgggaccactgtattgttgctgggcctctgggcagatggaaccatggtttgtgctctggcaggatccagttctgcaccagggctcttggccttccgcttcaattaggtggttgccctccactgtctgttccatctgtacgctcccctcacagtgggggctcacccagccttacctgccctgtactctcccttttccagcacccacctcagagagagtgcctgtgctctttcccctcacaccacctaccaggcgctgaccttcgggctgggggctggccttgggtgttgcagggctacctggcccagggagtggtgcttggggaggaatgagcttctgacacctgcacaaggaaggccccctttgagcagggcctgccagtggggttgggtcactcaaaggggctgtggattggtaggtactatgatcacagtttccagaacataatgcctgagtgagcgcatgtgttttgttacatgttctctcagacattttatgaaggtttgtacatttttttgcattaaaaatgttaggaatttaacttgacaagaaaaaggagcataaggccgggtgcagtggttcacgcctgtaatcccagcactttgggaggccaaggtgggtggatcacctgaggtcgggaattcgagtccagcctgaacaacatggagaaaccctgtctctactaaaaatacaaaaaattagccgggtgtggtggtgcatgcctgtaatcccagctacttgggaggctgaggcaggagaatcacttgaacccaggaggtggaggttatggtgagctgagatcgcgccattgcactccagcctgggcaacaagagcgaaactccatctcaaaaaaaaaaaaaaaagtttaataaacattaaattgctaaactttacgttcttctaaatttagttacgtatttgagcatacttttttttcccccacgaaacaggggcttgctctgttgcccaggctggagtgcagtggtgcaatcttggctccctgcaacctctgcctcccgggttcaggcaattctcctgcctcagcctactgagtagctgggattacaggtgcccaccaccacgcctggctaatttttgtatttttagtagagatggagttttaccatgttggccaggctggtctcgaactcctgacctcagatgagctgcccactgttgcctttcaaagttccaggattacaggcatgaaccactgtggctggccttttttttccaattttttgttatggtaaaatacacgtaacaaaatttaccatcttaaccattttcagtgtgcagttcagtggtggtaagttcattcatacttttgtacagccatcaccaccatctgtctccagaacccttcatcttgtaaaactgaaactctatacccattaaacactgcctccccatctcccctccctgaagcccctggcaaccaccattctacttcctgtctctgaatttcgctactatagggacttcataccagtggaattaggtagtatttgtctttttgtgaccagcttagctcatttaccataatgtccttaaggttcatctatgttgtagtgtgtgtcagaatttccttcctttttaaggctgaatactccattgtgtggatatactgaattttgtttatccatccctcaacagacacttgagttccttctaccttttgactattttgaataataaaactgtgaacctgagtgtgtaaatacttctccgagatcctactttcaatttttttggatatagatctagaagtgggattgctggatcatactggaattctgtttttaattttttagggaacctccatccgatttttcgcagcaactgtactgttttatattccttttaatttaatttattttttatttttccaaggactcaataaggagagagtatcagtttacattcctaccaacagtacagaggttccagtttctccgtatcttacccaacacttattttcttatgtgttgttgctttttttaatagcagccatcctaatggatttgaggtggcatcttactgtcattttgatttgtatttccctaataattagtgatgtggagcatcttttcacatgttcatcggccatttacatgtctttggagaaatatctcttcaagtcctttgcccctttttgaattgggtttcttacatgcatacgtgtgtgcgtgtgtgtgcgtgtgtgtgtgtgtgtgtgtgtgtgttttaaagagacagggtctcatgatgttgtccaggctggtctccaactcctgggctcaagtaatccagtaatactcctgcctcagcctcccaaggagctgggacttaaagacatgggcccctgtgcctggctatgttcatacgtttttacatattttttaagctatattgtgttatgcttttagttggcattttagtgatttttaaaacatttatataatccacacatttctcgttttaaaaatttaaggtctcatacacttttgtgagtccagtttttttctttttctttttttttgagacagagttttgctcttgttgctcaggctggagtgcgatggcatgatcttggctcaccacaacctccacctcctgggttcaagcaattctcctgcctcagcctcccaagtagctgggattacaggcatgtgccaccccgcctggctaattttgtattttcagtagagacagggtctctccatgttgttcaggctggtctcgaactcccgaccttaggtgatctgtctgccttggcctcccaaagtgctgggattataggcgtgagccaccatgcccggccagttccagttttttgtattattttacggccatgctctatgttgtggagccttttgagtatttaggttttgatactttctgtgttttgccatccgaaagctggagtccctctgacccaccaagcttagtgctgacagggagagtagagaggggtggctgctgtgcagggagggagtgcaggtgccagttccacagtgctgtgtgcccagtgtaggcagtgcctgagagaggctgtccatgggaaaggggtccttgcctccaagggttagggttcctcattttcttttctttttttttttttttttttttttttttgagatggagtctcactcgctctgttgcccaggctggactgcaatggcacgatctcggctcactgcaacctctgtctcccgggttcgagcgattctcctgcctcagcctcccgagtagctgggactacaggcatgcgccaccatgcccggctaatttttgtacttgcagtagagacaggtttcaccacgttggccaggctgatctcgaactcctcacctcaggtgatccaccctcctcggcctctcaaagtgctgggattacaggcgtgagccactgtgcctggccccttattttctttctgttcctttttttgtttgttttttggtttttgtttgtttgtttgtttgttttgagacggagtctcactctgtcatccaggttggagtgcaggggagtgatcttggctcactgcagtctccacctcctgggttcaagtgattctctgacctcagcctcctgagtagctgggattacaggtgcaaggcaccacacctggctcatttttgtgtttttagtagagacggggttttgccatgttggccaggctggtctcgaactcctgacttcaaataagttgcctgcctcgacctcccacaatgctgagattacaggagtgagccaccacgtccggccagggtcttaaaactttgatgcgaatttaaatttaccagctgtaacagaccatccagctcagagtctgttaaaacaaattgcaggccgggcgtggtggctcacacctgtaatcctagcactttgggaggctgaggcgggtggatgacttgagaccaggagtttgagaccagcctggtcaacatggcaaaacccagtctctcctaaaaatacaaaaaaattagctggtcatggtggcgggtgcctataattccagctactcaggagactgaggcaggagaattgcttgaacctgggaggtggagattgcagtgagctgaaatcgtgccattgcagtctagcctgggcaacagagcgaggctctgtctcagaaaaaaaaaaaaaaattaaaaaaaaaattgcaaaaccattaaaatgtaaaatacctttgatactagaattttgttttgtctttaggggacatatgtgggcctttgggttagaaatactttttgatacagattttaacaggatttacgatctatgattttatttgaatattacacttcaaatgatacctcgccaaaccttgtttgaaaaataaagtgatggctgggcgcagtggctcatgcctgtaattccagcactttgggaggccaaggcgggtggatcatgaggtcaggagttaaagaccgtcttggccaaggtggtgaaactccatctctactagaaatagaaaaattagccaggcatggtggcaggtgcctgtaatcccagctactggggaggctgaggtaggagaatcccttgaacctgggtggtgaagattgcagtgagccgagatcatgccattgcactccagcctgggtgaccgagtgagacttggtctcaaaaacaaaaaaaaagtgatttcttgacaaatgttttcctcagaatgagtcatttattgactgaacatctctttggaataggagctgtggaagccagggtggaagagagatggacaactggcttgtggtttctgaaccacaggtgcctaaaacttctcacacacaaaatgaaagctcacttaactgtcatgatgtatagttagtgtcctaaaaggtgtcctggagaaggtattttgggaggactggtaacaaaacacaatacctagagatgcagtctctggatctgactgttgtgttgtcttcagtcgttttctggctttataaatgcctcagtgttactgtttgctagaactggaattaccctagaatttccagtggaattgtggctgctcattagtcaacactgctctgggtagcagctaggaggtggcactctgggagttggtcctctgctaggcgcggcacctggtgagggggatggggctgtgtggactcctccagcaaggcagcgtctagtatattacattacagtacacaggatagtgtcactaaactgagtcagagagcacattttaggtggatttaaagaagtatactcaggccaggtgcggtggctcacacctgcaatcccagcactttgggaggccaaagtgggcagatcacctgaggccaggagttcaagaccagcctgaccaacatggagaaactcttgtctctactaaaaatacaaaactagctgggcgtggtggcgcatgcctgtaatcccagctactcgggaggctgaggcaggagaatcgcttgaacctgggaggcggaggttgcagtgagctgagatcgtgccattacactccagcctgggcaacaagagctaaactccctctcaaaaaaaaaaaaaaaaaaaaaaatatatatatatatatatatatatgtatactcagattttctgactcctctgggtactagaaagaggaaaagaaagtctagtaagattttttaaaaagtatcacttgtctttgaacagctataattttggtcagggattggcaaaccacaggcctatgggccagatcccactgaccttttttttgtatggccctagggctgagaatggtttctactttttttttttttttttgagatggagtcttcgctctttcacccgggctggagtgcagtggcgcgatctcggctcactgcaagctctgcctcctgggttcacgccattctcctgcctcagcctacagagtagctgggactacaggtgcccaccaccacacctggctaattttttgtatttttagtagagacagggtttcaccatgttagccaggatggtctcgatctcctgacctcgtgatccacccgtctcggcctcccaaagtgctgggattacaggcgtgagccaccgcacccggcctctacatttttaaagacctgtaaagaaagcatacgtaatacagacagtatgtgacccacaaacctgaaatatttaccttctggccctttacagaaaatgtttgctggtcacacctcccacaccttcagttctttttgtttttgtttttgtttttgagacggagtctcactctgtcacccaggctggagtgcaatggcctactctcagctcactgcaacctctgcctcccgggttcaagtgattctccctcctcagcctcttgagtagctgaaataggcgcgtgccaccacacccagctaatttttgtatttttagtagagatggggtttcactatgttggccaggctggtctcaaactcctgacctcatgatccgcccacctcggcctcccaaactgctgggattacaggcgtgagccactgtgcccggccagccctcagttcttacttggaccaaatcaaagttggtctggatctaaatggaatcaaatagcagaactgttgggagatatgaaaaacacatggggatttggtgagctactctccttcagctgactcatgccttgctgtgattggtatacagtattgtctatgtaaaagttgagcctaaagaaatagctcttaaatcaccattagaattgtaaaggaatatatgtgagtagttctaacagctgaagtctagaactctgcttcagtgactagttcccattgagcgctgggacacgctttgctgagagtcactgtggagggtcagattctttccggtggctcccatgcttcaccgagagcagttgtgctgatcccccaggccactgggacagcagggcaggctccttggtcagggctggcccaggaacggagtgggttgatgagagggagcctggtccctgggatactggttagggtctacaggctggggaccctgcgggctggatgaggaccccctcactggtctttggcttctcaggctggggaccctgcgggctggatgaggacccctcactggtctttggcttctcaggctggggaccctgcgggctggatgaggaccccctcactggtctttgacttctcaggctggggaccctgcgggctggatgaggaccccctcactggtctttggcttctcaggacttctttctttgtagaatctccctcatcccttcctttttctgtttgatgtctctttcctcatttcttctgtaaaataaacgtaaaaagggactgaataatttccaacttttttttttttgataaagggtctcactatgttgctggttttgaactcctggactcaagcaatattcccgcctcgggcttccaaagtgctgggcttacagatgtaagccactgggcccggcctatccccaacctgtttttttcagtttttttccatttttttcagcttttgtgatagttttctcatggatcttttgactggtcaggataacattgcttagagatgtattttacttgattacttaaatgtatgtttctgtttcaattttttattttttttgagtcagtctcactctgtcaccctggctggagtgcagtgatgtgatctcgatttcactgcgacctccacctccagggttcaagtgattctctcaagtctcagcctcccgagtagctgggattacaggcgcctgctaccacgcctggctaatttttgcatttttagtagagatggggtttcaccacgttggccaggctggtcttgaactcctgacctcaagtaatctgcctgcctcagcctcccaaaatgctaggattacagtcgtgagccaccgcccccagccaaaaagcagatttaaaatgttagacaagctgaactcaaggcggaagcattagatagagggatattaacatatcatttacaggcatagttaataatcatgggcaggcatggtggctcacacctgtaatcccatcactttagaaggccaaggagggcagattgcttgagctcaggagtttgaggctagcctgggcaacatggcaaaaccctgtctctacaaaaaatacaaaagtaaaccgggtgtggtggtgcatgcctgtggttccagctactccggggctgaggtgggagggttgcttgagtgagggaggtcgaggctgcagtgagccagatggtgccattgcactccagcctgggcaacagagccagaccctgtctcaaaaaaaaaaaaataataataataagcggacacagtgtgcctgtaatcccagctactcgggtggctgaggcaggagaattgcttgaaatcaggtggtggttgcagtgagccgagatcacaccactgcactccagcccgggtgacagagcaagactccgtcataaatgaataaataaataaataaataataagtaacgatccactgtggcttcctggaaacatccatgttcacagctggggtctggtcagtctgcatagtggagcacactgctaggatgcatccttagcaagtgaaaaaagtgaggctcagaactgtttgtagagtatagccttttatctaaggaaggcagatgaagactggcttatgataaaggtgctaacccccagactagtaaaaatggggttccctgtggagtagggaaggggcagtgttataagttggatttctggccatatctgctatagtactgatcatggaactctaggggaggaaagatgttttccttctacccatcttacgttcattggctggggctcctggaacagaagacagatttacaaaagagaaaggcacacaaatttatgtaatataagttttacatgacatgggagcctttataaggaaatgacccaaggaaatggttaaacctgagtggttttgtgttaggtttgatgagcaatgaaaagctatggagaactatgataggaggagtgtgagctaaacgcaatgaactgggggaaacttagcaaggtctgttcagatttctctctgtatccttctttggaggtcagcatgtttcctccccccgtagatacggagggcacttctcacatgagggtcttaccacctgctttgggtgagggtcagaaagtccttcctaggtttcgtgacctgcctcaggagagaagggttggggaaggtcagagagatgttcctgcacaagctgcttctcaaattctttcagcttcaaatattcagtgtgcccaggtgccacattttggggtagcatgtcctgaaccttgtcaaaactatatggatgttttaatatagttttaaaataaaatgaagtcaaaagttggggggaagtagtctctaaaaattgaaagcagccgagcactgtgactcacagctgtaaccccagcatttcgtgaggccaaggtgggaggatcgcttgaagccaagagttcgataccagccttggaaacagccagaccccatctctacaaaaaaagaaaaaaaaaaaaccctgaaagcaaaacgaataaaaataaccaaaccacaaattgagttggtggcttaactatacagagaggagttatttcaagtgacttcaaaacaaattgtattggccaggcgtggtggctcacgcctgtagtcccagcactttgggagatcgaggcagtaggatcatgaggtcaggagattgagaccatcctggctaacacagtgaaatcccgtctctactaaaaattcaaaaaaatttagctgggcatggtggcgggcacctgtagtcccagctactcgggaggctgcggcaggagaatggcgtgaaccccagaggcggaggcggagcttgcggtgagccaagatcgtgccactgcactccagcatgggcgacagagcgagactccgtctcaaaaaaaaaaaaacaaaccaaaaaaacaaattgtattgtacatcctagcagggtaaatcctaaagacaaaataactaaaaagaaaccctgggcagtttttagtatgtgaattgttagtaataacattttaacttatttatttatttatgtacttactgacttacagctactttttgagatgggatcttgctctatcagccaagctggatcatgccactgcactcagcttccaaacctttgctcttgctggagatgcactactacaaataagccacaggacatcactttcttcagaccctgcagagcatgttacactcatgtggcttcggaagctgcattctggtcacagctgagcgtctttcgtggtgcttgcctcatgggccagctgcttcatcagctcaccctgtgtttcccattttgaataatgccgtaattcataggttgaattgatgtaattcactgttgcaggcaccagagttgtacagattgttgacaagtgtcctgtccttgtgagttcgaccttatcttagaagcacaattattttatcgtcagaggtcaggctgtgtagaagaaatagcagggctttggagctggacagattgaagtcacccaacctctggtacatctgtgtcctcaacagggaaacaaggacaactaacctatctgcgtcttctagagtagtctggtcacagctagtgtgaaccccccggtcacactgttagtggcaaaaaaccattttattatgtggacaaattctgtggaccaggaatatggagaggaagtggccgtctctcctccaggatgtctgagtcctcagctgggacgactcagcggctgggggtgacgtaatgactgaggaatggtatcttctggaggcgctttctgaaatccgtcagctggaacacgagctggggatactgaccagagcacacgtgcagactccacaggacctgggcttcttcacagattagaggaggtcttcacagcactgggggttccctcacagcactggggggttccctcatagcattgggggcttcctcacagcactggggggttctctcacagcactggggggcttcctcacagcaatgggggccttcctcacggtatcgggggctccctaatagcattgggggcttctttgatatcattgcgagcttcctcacagcactggggggcttcctcagcactgggggtctcctttatgtcattagggggctttctcatagcagtgtcaggggggcgttcctcacagcatggggcttcctggtagtcggagtgtcactatgaacaagatggaagcctccttgccttttctaacccagctctggagtcgcacaccatcatttccactgcattctcttgttctcaaatgagtcactaggtcagcctggattgcagaggaagggacaaagacctcgtgtctcgatgggagaaatgccatagagttgggggatgcactggccttggcatgtagtagacacagctctgtctgccctcactgcccctttcctcccctcacgaagctccattcttctcctgacactcaaaacgctgactgaacgaatgtccgtctcgcctccacagggcctacatcaacaggactcgcgggccgagcttccaggcgccttgagtggctgggccgggcctccacgttgccctgctgcagggttaggtgggagcgagactggccccactcctgttgactgttccaccagcaccttcagtttgtggaagtggttgtgtccaaagagattttcgtaaaaacatcacaattctaaaacttttttttttttttcacaattctaaaactttatgcatttttggcatttaaaaagccctggcaagtctactgccttatttctcctgctcccttggcctgtgggtctgttcctgtatggttacccactttgttttttttgtttttttttttttttgctgttactgtggctttgtagtatattttaaaatttggtattcgttaactctttttttttctttttttttttttttgaaacagagtctcgttctgttgcctggcctggagtgcagtggtgcagtctgggctcacagcagcctccgcttcccgggtgcaagtgattctcctggctcagcctccggagtagctgggattacaggcacacgccaccatgcccggctaatttttgtatttttagtagacacggggtttcaccatgttggccaggctggtctcagactcctgacctcaggtgatccactggctcagcctctcaaagtgttgggattacaggtgtgagccgccgcgcccagccttttttttttttttttttttttaaggcaaggcggggtctccctttgtcgcccaggctggagtacagtggtatgatcacggctcactgcagcctcgacctcccggactcaagtgatccccctgcctcagcctctcaagcagctgggactacagacatgtgccatcatgcccagctaaatttttggatttttagtagagataaggtctcactttgttgcccaggctggtcttgaactcctgagctcaaacgatccttccacctcagcctcccaaagtgctgggattacaggcgtgagccactgcacccagccaatttttgtatttttagtagaggcggggtttcaccatgttggccagactggtcttgaactcctggcctcaagtgatccacccacattggcttcccaaaatgctagtattacaggcacgtgccactgtacctgactgttttaaccagttttgttagagagaaggactaccaatctatacattttgaaattctgacttttccctcatattatgaacattttgaaagacaatctgagagtagaatcttgattatctgctacctagattcaacagttattgttatctggacccaatttatttatgtttatatttttattgatccatttgaaagtaagttttggatatcatggtcatacaactaaacattgagcacgtacttctcaaaatggtgatatttatgctgtgagcttatagctttatcacaccatcaaaataacactcaatctctaatagtatataatactatatattcacatctcctcaaatttccttaagttgtcttttacagtgtttgtttttgaaaccaagatcacataccacatttggttgttgtttcttttcttttctttttctttcttctttttttttttttttttttttaagacagagtcttgctctgtcgcccaggctggagtgcagtggcgcaatcttgacttactgcagcctccgcctcctgggttcaagcgatttttctgcttcagcctccccagtagctgggattacaggtgcctgccaccatatccagctgatttttgtatttttagtagagacggggttttaccatcttggccaggctggtctcgaactcctgacctcaggtagtccacctgcctaagcctcccaaagtgctgggattacaggtgtgaaccaccacacctggccgtttacttttatttttgccagtttctttatagagtgcctctcagtttgggttcctgggtgtgtcctgaggattggactcacagcttgcattttaggaaggactgcacagaagccagtagagtgtatccttttcattgcatcattgttttccctttgtaattaataagtgtcttgagcctggtgctgtggcacatgcctgtaatcccagcgctttgggaggcggaggtaggaggacggcttgagcccaagagttcaagaccagcctgggcaacagagtgagacccctgtctacaaaaaaatgcaaaaattagccaggtatggtggcatgtgcctatagttctagctactcaagagactgaagtgtgaggattgctttaacctgggaggttgaggctgcagtgagccagagtcttgccactgcattccagcctgggaatagagcaagaacccatctcaaaaaaataaaaaatgaaatgtatcttgtggcaggtactttgagattatgtacatttcctgtttctcatactttcacaaactagtgttagcatccatcgatgattcctgtctgaaacggcttactgtggtggttgccgaatggtgatgtttgaaagctgtcgtcatcctctacacgttagagaactcttgtattttagagctttttctgctccccatctattcatttatgtatttatatttttaaagaaaaacttattctgacccttattaaagttagcaaggcacttagtgctttgggaggcaaggcaggacgatagcttgaggccaggagcttgagaccagcctgggcaacaaagtgaaacctcatgtctacagaaatttttaaaaattagccaagtgtggtggtgtgagcctgtagtcctagctccgtgggaggctgaggcaggaggatcacttgagtccaggggttcgaggctgcatgattgcaccactgtactccagcctaggtgacagagcaagaccttgtctcagaaaagcaagacaaagggcaggctgttcaggatgatcatgataggtatagggactgctgcaatgggattgtgtagtgggggagacctaggagcaggagtgggggccatggacggaaaatttaactaagaggaaacatcagggtgcagggggttctggctgaactgacctaacaggattcttgtggaaggccgctagcatcactcctctggaccataaacactcggggagtcccaatctctcctgagcagtgcattggcgccagctttccagatgtgtgtgtaagtccatcatcctttaagaagtttgcttagaaagcctagatgctgagacttaaaaatggagtctcaccatggacagttctcataaagaattgtctcccaacaaagtggctgactgtgttgtggctgtattgttacagaccttctcagatgtgtttgctgcaagttttgtttatttggaactctttggaagctagcacaactacatagaaacccatataagttagccaccatgctcagctaatttttaaaaaaatttgttgtagagatggggtctcgttctgttgcccaggctggtcttgaactcctgggctcaagtgatccttccaccttggcctcccaaagtgctgggattacaggtgtgagcctctgtactcagctaatttagctagtttttgtatttgatttttttttttttaatagagtctctgtcatcccggctggagtgcagtggcacgatctcggctcactgcaacctttgcctcccaggttcaagtgattttcttgcctcagcctcccaagtagctgggactataggcatgtgccaccatgcccagctcatttttgtatttttagtagagatggggtttcgctattttggtcaggctggtttcgaattcctgacctcaggtgatcctcccacctcagcatcccaaagagctggaattacaggcatgagccataacgcctggccccatatgctgtttatttcatttttcccaagcaaactaggacttagagattgtttcacaaagccctgctgactcattttcaacacttctccacaggactagtgctatgcgtcagcagacgctgcctgtgtggggatggaggttggctcagacacagtgcgtggcctcgggagccttacgttccagcaaccacttgactaacagtcataaaaattaaaattgtaaaatattttgtcaactgtgcatcagccaaacaaaaaaaattaaaattgcctaaagtggaacaaggagatgtgggatgaagtcaagcaaattatgtgtccaaaaatgtataatgtcagtgattagcttcaggaagcatttgtatttagtgcctattgacatcagagacagcgctagtagttggggatgcagcaagacgggcccctggcccttaaggaacttgtagtccaaatgaacaactgaagtactgcggagctgagcagagggtgctgtgtgagggtccagcatggacaaacttaaccccagtgtgggtgagattcatcaggaaggctttctggagaaggtgatgtgggcgatgcatgttctccacctagccatgcccagagggaagtgtgtctgggcagaactatcaggctggggaggactcaggggtgggagagaacctggcatgctggggaagctaaatgtggcgattggtttgtttatacaacttggagtgcggaagggggtcagtaaggggatgctgatgcctgagggtgagggttgggcagaggcaattttaagcatgtgagtcacatgatcagatttccattttagaaagcttggagaatgggtctactcaggtagctcacaccttgtgttgtccattttcacactgctgataaagttgtacccaagactgggcaatttacaaaagaaagaggtttaattggacttacagttccatatggctggggaagcctcacaatcatggtgaaagacaaggaagagcaagtcatgtcttacatggatggcagcaggcaaagagagaagcatgtgtgcaggggagctcctctttttaaaaccatcagatcttgtgggacttattcgctatcatgagaacagcacagaaaagacttgcccccatgattcaactacctcccaccagctccctcccataacatgtgggaattcaagatgagatttgggtggggacacagccaaccatatcattgtgcccctgccccctcccaaatctcataatcatgtttcaaaaccaatcatgccttcccaacagtcccccaaagtcttaactcatttcagcattaacttaaaagtccacagtccaaagtctcatctgagataaggcaagtcccttccatgtatgagcctgtaaaatcaaaagcgggttagttacttcctaaatacagtgggggtacaggcattgggtaaatacagccatttcaaataggagaaattggccaaaacaaagaggctacaggctcccatgtaagtctgaaatccagcaggacagtcaaatcttaaagctcctaaatgatttcctttgactgcatgtctcacatctaggttatgctgatggaagaggtgggttcccatggtcctgggcatctccgcccctgtggctttgcgggatacagcctccctcccagctgctttcacgggctggcatttagtgtctgcagcttttccaggtgcatggtgcaagctgttggtagatctaccattctggggtctggaggacagtggccatcttctcacagctccactaggcagtgccccagtagggactctgtgtgaggcctccagtgccacatttcccttccatactgtcctagcagaggttctccatgagagccccgcccttacagccaacatctgcctggacatccaggcacttctgtatattttctgaaatctaggcggaggttcccaaacctcaattcttgacttctgtgcactctcaggcccaatgccatgtggaagctgccaaggcttgaggtaccctctgaagccaaggcccgagttctgcattggcccttttcagccacggctggagcagctgggatgcagggcaccaagtccctatgctgcacacagaacaaggaccctgggcctggcccatgaaaccagtttttccttctaggcctctgggcctgtgatgggaggggctgccatgaggacttctgaaatgccctggagacattttccccattgtctgggggattaacattaggctcctcattacttatgcaaatttatgcagccagcttgaatttctcctcaggaaatgggattttcttttctttttttttcttttgaaatggagtctcactctgtcacccaggctggagtgtagtggcacaatcttggttcactgcaatctctgcctcctgggttcaaacaattctcccgcctcagcctcctgagtagctgggattacaggcgtgcaccaccaagcccggctaattttcgtatttttagtagagacggggtttctccatgttggtcaggctggtctcaaactcctgacctcatgatcctcctgcctcagactcccaaagtgctgggattacaggcatgagccattgctcccggctgggattttcttttctatcacattgtcaggctgcaaattttccaaactttcattctctgcttactttataaaaccgaatgctttcaatagcacccaagtcacctcttgaatgctttgctacttagaaatttcttccaccagataccctaaatcatctctcaagttcagagttccacaaatctctagggcaggggcaaaatgctgccagtctctttgctaaaacataacaagtcacctttgctccagttcccaacaagttccccacctccgagacctcctcagcctggactttactgttcatataattatcagcatttttgtcaaagccattcaacaagtctctaggaagttccaaactttcccacattttcctgtcttcttctgagccctccaaactgttgcaccctctgcctcttacccagttccaaagtcacttctacatttttgggtatcttttcagcaacaccccactcctggtaccaatttacagtgttagtccatattcatgctgctgataaagacatacccaagactgggcagttttcaaaagaaggaggtttaatggagttacagttccacatggctggggaagcctcacaatcatggcggaaggcaaggaaaagcaaattatgtcttacatggatggcagcaggcaaagagaggagagcatgtacaggggaattcctctttttaaaaccatcagatctcatgtgagacttattcactatcaggagaacaacatgggaaagacttgcccccatgattcaattacctcccactgggtccctcccacaacacgtgggaattcaagatgagatttgggtggggacacagctaaaccatatcacacctgtaatccagcactttgggaggctgaggcaggagaattgcttgagcccaggaattcaagaccagcctgagcaatatagcaagacttcatctctacaaaaaatttaaaaagccagcatggtggtgtgggcctgtagttcctgctgtttagggggctgtggtgggagcatctcttgagttcaggaagtcggggccccagtgagctatgattgcaacattgcagtccagcctaggtgacagaacaagaacctgtctctaaaaaagggagaaaaaaagaaagcttggagaatggactggaagagggaagactagaggctcatacaaccaggtaggagcctcctaccaccattgaggtgtgaggtgatggcgctgaattagagccactgcactggggtgcaggggagcagatggaagtgaaattggagggaaagcagagatttggaggagagccaggttatggtcaaggcggagtcctgttaggagaggttcagtgacacgtttgcagatgtgtagggtctctgcagaacagttgtcttggggaagagttcctgaagtgttttcctcatattttaattgcacatattccatttcatgggtggccgttatccgttataccaggctgctgttgaaagcggtttccagccttttctgttaccagtggctcccatgccgtgttgcaagggtgtacctgtgttgataggattcccccgggctgtgagattgctcagtcacagccttctccctgcaggctctcctgctcattggcagcaccctcagccccactcttccttggcactcagcctcctcttccttggcactcagctgtccttgccgtggctggcactcccacatccttggtcctccttctccacgaggctttgggggcaccacctggttcttttgctgtcccatggcagttcttcatcctgtgctgtgtcctcctgtctccctgagctccagactgtcttctagcacaggctgttctctctcttcctgaatggtctcataaagtcttaaggctttaaacacattaaatatctaaaaataaagttggccgggctcagtggctcatggctataatcccagcactttgggaggctgaggcgggcggatcacaaggtcaggagatcgagaccgtcctggctaacatggtgaaaccccgtctctactgaaaagacaaaaaattagccggacgtagtcgcaggcgcctgtagtcccagctactcgggaggctgaggcaggagaatggtgtgaacctgggagatggagcttgcaagtgagctgagatcgcgccactgcactccagcctgggtgacagagcaagactccgtctcaaataaataaataaataaataaataaaaataaaaataaagttttagccacccaccctggcagatttatttttagtattgtaggcacagggtcttgctatgttgcccaggctgatcttgaactcctgaactcaagtggtccttccacatcagctctcagagtgctgagattacaggcatgaaccgccgtgtccagttagacgtgtctttttggaggacacagttaccctctacatgtactaactatactttgatggtggccaaatctgcgtttctaggccagactcccttgctcagagttttaatgggggtgtctgagaagcatctcaaacttaaaatgtcccaacatgccctcccctcccaggccacagaagctgctcccattgactgtggccccactcttgtacccattgaccgtacctcctctcttgtactcattgactgtgccccctcccttgtatccacaactttgccccctcccttttaccccattgactgtgcctcctgtgccctttgactgcacccccttagtggctccagaatgacgctgttgagggtgagtcccagctcagcctctggccatcgtggtggctgaggccacattgctcaggcttctaaggtgtaagtggcatcacagcagtgcctcccacggattttgtgagggcagattgcactaagatggctcaatgtgctcaagaggcgacctggctgctgccacggctgctgctgttctcactggactccttgttcctttttctttcatttgtttgtttttggagatggagtctcgctctgtcacccaggctggagtgcagtggcacgatcttggctcactgcaacctctgcctcctgggttcaagcgattctgctgcctcagcctcctgagtagctgggactataggcgcatgccaccatgcccggctaatttttgtatttttagtagagacagggtttcactatgttggccaggctggtcccaaactcctgaccttgtgatccacccgcctgcacctcccaaagtgctgtgattacaggcgtgagccactgcccggctccttgttcctttgaactgtctcgctcaggacaggacggtagtccttctgcatcctgcaagacttggacaggatttctttccatttaacactgtctcctaaagtgctgctttccttggggaactttgctgttcttgctagtccagaacaagtggcacaactgcccttgacctccacatgaccttctcagggcagcccagactctaaatgtctgtgacctgcaccagcagcagcaaggccatgccggccgtggtccagcccggctgctctcccccactctgcagtgtttttccacacccatgctgcaggtgctggttgcgttcctgctccatccttcagtgcggaagtggcattttgcggttttctgttgtcatgaagcaagtgcgccacacttgcctgtcttatgtgcgtgtgtatatgagcatgcccatctcagtctccctgagcgcctcttttccacccgtctcaggcctctgtgttagctgttccctctctctgaaacaccaaactccctgatctcagcctgtctctccagtctcgacgtaacagcatcttcccagcgaggcctgctctgaccacacggcccgggaaagcagcccaggccccctctcacttcaccctgtgcccattcttgaccctgtgtattgtgtctctcccttgcctggtttgtgtcaggaaggcagaggccctgcctgtcctgctcactgccgcaccccaggcccagcatgctgcctggcatgggcaggcattgacttgatattagctgggcaatgaatgacagtgactgaaaatgtaatagcaagtcagggcctagcacaggaaaataagtgattgctatgtaagtgaagggttgctaagtaggatttgggtcataacatactgttaaggataatttttttgttctctacatgtaaaaatatgtatttttaaaaattggatgtcatgggctgggtgtggtggctcatgcctgtaatcccagcactttgggaggccgaggcgggtggatctcctgaggtcgggagttcgagaccagcctgaccaacatggagaaaccccgtctctactaaaaacacaaaattatccaggcatggtggcacatgactgtaatcccagctactagggaggctgaggcaggagaaacacttgaacctgggaggcggaggttgaggtgagccgagatcgcgccattgcactccagcctgggcaacaagagtgaaactcggtctcaaaaaaaaaaaatttgatgttatggaatgagggagacaaaaaatgctctacaactattaactgatgcttttctggttttgttctccagacaccattcgcttttcacccaagatgatttgatgtcttataaaactctgatgaaccatgatggctacacagacattaagtatagacagctatcaagatgggcaacaggtgagcttgaacttgattctgcattctaattacaaatcaacctggcactcaagcatgaacattgctttgtatacttgcaattcaattgccatgaggttgcatgctcagtgttagtgtattatgcatttattgtacattcgtgttcagaaaaaaagccatagaataatactatttcgttaactgataccaagattgccaggaatcttgacttccctaagtcatatgacagtttcttgggaatttacctttttaatgtcagtgttaattagcactgttactttgaaagaaaacccggttgattttcatgatgacagattcccatgttgactggtggctcttctgagtgtctaactggatcagcttttgaatgggaatcttgtagcctcgtctccccagttgtaggcatgagaggggctgtcccagtaatgaatttgcaggggccccagtgctctatctttgtaccttgctcgtgcttggatggttgtgccatacacgggcagctctccattgccctcccaccatagatgagactttgttctcctggaagctgtggtgttttgtgcttttgagtatctgagtgttttgtgttctgtgacctgaatgaattgaggagcaggtggatcgagacttggctgaggcccttgtggtctttcttggcttgcgatcttgttaaacacggtgttctgaacccactggcatttggctcatcatcccactgactctggagccagtgaagggatttggccctgccctttactttcctgcccagcaggcaggggcagtgcagtacacccccctcggctctcctccccacctcgaggacttcggtggcaaggatcaggctccggaaaactcactggagccatgctggtgaggtctgaggaggggttaggagctgaggcgctgggtccccctttccctggtggttagttttaccaaccagtccttgttcagttcctgtggcagagatttttgttgttggtggtggtggtgttagtgtttttttttctctgtatagcaattaaaggagggagattctgtgatgtagtcagcctgcttccttagcctagaagtccttagtcctttggtatttccaattgacttttttttttttttctaaaatgcaaatctaataatgtcccgcctgagctctccagtggctccctgtggattcctgtgggtttcatgcaaagactgagctgctctgtggcccgaatcgtctggcccctctggaccccaggacgcccccaacatctctgcctggcatatcttgggcacctctctgcctgccctggagcaccggtcctcactgttcccatcactcttctccctcctgcctgccaggtctttgctccgaccccactgctgcctcctgtgcaccaaggcacggtgaccacctccaacacagcctggttgctaccagccacctcctcccaggcagctgtgccaggtgcagatgacacctggagcactgcccttttcatacccgagtgtttccaagggcctcggaagtgtttaatcagcattattttaaataaacattgaaatatatctacagcgtagacctatcataattattttgccatttttccaaggttgaacatttaggtttctctcttttcacaatcatttttttttcaaatactgaaatgaatcttttaaggcttcttattttttattatttatttatttacttatttatttattttgagacagagtcttgctctgttgccccggctggagtgcagtggtgtgatctcagctcactgcaacctccgtctcccaggttcaagcaattctcctgtctcagcctcctgagtacctgggattacaggtgtgtgccaccacgcccagctaatttttttgtatttttagtagagacagggtttcaccatgttggccaggctgatcttgaacccctgacctcaggtgatccgcccaccttggcctcccaaagtgctgggatcacaggcataagccactgtgcctggcctttttaaggctttttatacatgctggcagattgccttacacaaatactgtgtccacttaggctttattgcttttattttttttttttaagagaaacataaacagttttcctaatatgttgtaccatttaaaggcagcagaatagaagtcatcttattgcaaaaacaagacattggagggaagagagcacagggctggaggatgtgagaggcgtcctgtgcgggtgggcgttcatggctggcccccagtctgtctggacagtggggatggccccgctcccatgaggtctccccgcccccgctgccccaagctgcttcctcaaggggcagaagcatggccaaatccaccgcgggagaaatggcccgtcctggtcctgaggaagctgaggtcaggacagtctaatctgctgctcatggataactagaagtttactttcacgaaattttgtttttgtaaactgattttttttaacgatttaaatgttttttacctaaatgacaaaggcattgcttgtttaaagcagtttaaatgatagtatcttttaaggctttaagtaaacacagctggccttttcctttctgaatgcagtgacatttttatggctatgtattgctgaggtttgagggtagatatgggagaagttcaaccttgtcccaaatatgtagcgtatgggttaggttgtgtctgtgacatggtaagaagaccttggactatttgtctatgcttctctgactgtagtattgctacacgtgaggagatatagcaatagacggaggagtagattgcacgtgtgccgttctcttcattaggccatcgccagtgttattttaaaatcatgagcatttcacagacattggttatctcagttcttaagcagtttggaaattttacctttattttaaagcacattaaattcaaagctgttttgttggtagcattctttacatatgattgcagtcatactgctgtctggcaattccccactccaactgcattcctgttggagcatggaatacctcgtagtagtttgtgtttgctaataagaattatcttcctccttttacagatgcaagtagtaacagagttaaagacagaacaagatccaaactgctctgaacccgatgcagaaggagtgagccctccccctgtggagtctcagaccccgatggatgtggacaagcaggccatttataggtagtgcccggggtgccggctgtgggggcctcagaggagtgaggagtgtccacaagtttgttaaaaggaacaccagaactagtagcgaggcagagttgtgaggtgccattatgatgtgataactgctcggctgaaaattttctcagattaagatgttatttctggccaggtgtggtggctcatgcctgtaatcctagcactttgggaggctgaggcgggcggatcacttgaggttaagagtttgagaccagcctggccaacatggtgaaactccatctctactaaaaatacaaaaattagccagacatggtggcacatgtctgtaatcccagctacttgggaggctgaggcaggagaatcacttgaaccggggaggcggaggttgcattgagctgatatcgcaccactgcactccagcctgggcaacgagagcaaaactctgtcacacacacacacacacacacacacacacacacacaaagatgttatttctaatacctataaaagttttagaatatcaatctataaattttgtgtaaccttgcaaaaagaaatattcaggcacagatgattttactgagaattctacccaacatataaagaagaagagagcagcaagtctgcatagtctctttcaggaagtagaggaggagtgaatgcttcccaactcactttataattgacatcactctgacactaagaccaaagacaataccaaataaggaaaatacaggccaatatccttcatgaacttagatgtaaaaatcatcaataaaatattaacaaatcaattctagcaatatgtaaaaagaataatacgtagcgaccaagtcaagtttttcctgggaatgtcagacttgtttagtatttaaaagtctgccaggcgcagtggctcacacctgtaatcccagaactttggaaggccgaggcaggtggattacctgaggtcaggagttcaagaccagactggccaacatggcgaaaccctgtctctaccaaaaaatacaaatattagccgggtgtggtggtgcatgcctgtagtcccagctactctggaggctgaggtgggagaatcacttgaacccggtaggcggaggttgcagtgagctgagatcatgccactgtactccagtctgagtgacagagagtgaggccctatctcaaaaaaaaaaaatttttttttaagttcagcatagaattatatataactcagcaattctactcctatgcatatgtatacctaacacaaatgaaaaaagtccacacaaaaacgtgtacatgaattttcatagcagcacagcctatcatggccaaaagctggaaacagtgcccatgcccatcaactgatgaatgaacagacacattatggcatctccatgcaatgcaagaatatttagcagtaaaaggaatgaagtggcgggcgcggtggctcatgcctgtaatcccaggactttgaggggccaagtcgggcagatcactttaggtcaggagatcgagacaagcctggccaaaatggcgaaatgttgtctctactaaaacaaaaactaggccaggcatggtggctcacgcctgtaatcccagcactttgggaggctgaggcggttggatcatctgaggtcaggagtttgagaccatcctgaccaacgtggagaaaccctgtctctaaagatacaaaattagccgagtcatggtggtgcatgcctgtagtcctagctacttgggaggctgaggcaggagaatcgcttgaacccgagaggcggaggttgtggtgaaccgagatcacgccattgcactccagcctgggcaacaagagcgaaactccatctcaaaaaataaaaaaaattagctgggcatcatggcgggtgcctgtagtcccggctacttggggaggctgagtaggagaatcgcttaaacctgggagggcagaggttgcagtgacccgagatcgtgccgctgcactccagcctgggcgacagagtgagactccatctcaaaaaaaaaaaaaaaaaaaaggaataaagtactgatacccgtaaaacactggtaagccttggacactttatgctgagggaaacaagccagacaccacggtcacaggttagacggttcccatttagacagaatgtctaggagaggcaaatatatagagatagcaagtaggttctaacaggctggggtctgggaaaaaatggagaatgactgctattggatacagggtttctttgcggggatcatggaaatgttccaaagttgacggcggcaatgctgtgcaactgtaaaaaccgttgaattgcatactttcaacgggtggaccgtgtggcgtgtgcattttcacccaacagaggtgttagtgaagtagtgcaggcatacacgcaaagacattctcacggagatgtagaacgtaaatggattcttttttttcttttctcctcaggcatccactatttccattattagctttgttgtttgaaaaatgtgaacaatctacacagggctctgaaggcacaacttctgccagttttgatgtagacatcgaaaattttgtaagaaagcaagagaaggaagggaaacctttcttttgtgaagatccagaaactgataatttagtaagtaaaataaattttatttttagttttcaaaatgtgaaatctgttcatgaaattttaggcttctaagtagaactttagactgcttgtagttctgctaaaggagagactcatacaactctaaaagaatttttatggtgtgtgtaatgtggatatccccaagtcttccagccttctctaggtatcttttatttatttagtttttatttttagatttattttatttttgtagacacatcttactgtattcccccagatggtctcaaactcctggcctcaagcaatcttccctcctcagtctctcaaggcccaacctaccctttcctttaaaaataaaataaaataggccaggcgtggtggctcacacctgtaatcccagcactttgggaggccgaggtgggcagatcacaaggtcaggagttcgagaccagcctggccaacatctggtctcgatgttggccaaaatcccatctctactgaaaatacaaaattagccaggcatggtggcacatgcctgtagtcccagctactcaggaggctgaggcaggagaatcacttgaacgcaggaggcggaagttgcagtgagccgagattgtgccactgcactccagcctgggtgtcagagtgagactctgtctcaaaaaataaaaataaaataaaataaaataaaataatttgagcctccatgccaaatggacacggggattcagttctctgcacagtgtttgtaaaggtccgtagggctggggtgttcgggtggcatgtctgtgacctgtgtctgtccttggcttatcatggacatggacacagacttgagctgtattctccaagacagctctgtctttttttttttttttttttgagacggagtctcgctctgttgcccaggctggagtgcagtggtgtgatctcagctcactgcaagctccgcctcccaggttcaagccattctcctgcctcagcctcccgagtagctgggactacaggcacccgccaccacgcccggctaattttttttgtatttttagtagagacgggatttcaccgtgttagccaggatagtctcgatctcctgatcttgtgatctgcctgcctcagcctcccaaagtgcagggattacaggtgtgagccaccacgcccggcgacagctctgtcttgaggctgacagtgatttgtgatgccctccccccagggccagggctccaaaatccagcgttttctgtgccctccagaggcaatggagaacatcttggttccgtcatcactggattgctctgaatgagctgcacctgaggcacctgtacagcactgtcagctttgggcagaccacactctctgggtgtgctctcctgccagagtgtaaccacgtgtttacttctcagagctgggtacacaaagatccggcatcagggaaccttcactggattcccttcgagccatcttggtcccatatcaaaaccctggttagggccttcaacagaaaaggtttttggaaaactcatttttcctgaataaattgctgaggtcttagtttttaagaaaattctcattatatactcgatgcttaccatgaaacagattttgtgggtgagttatctgacttgaatctgtctcctcctctctgagatgagactaacagtgcatgctctttgggtgaggatccgatgctctctccacccctgagtctgtggtccacatccatcttcccattggcccacacctggcttggcccagtgagtagagcacaggtgtcctctgcaccccactaggctggcagggaccaaggttctcttgactggtgagtgtttagcacagggcctagcagagtttgacactccatcatttttgttactgagtgattcatttattcactgcatagatacctacgaattcctaccaccagatttacaggtgaaggagatgggcttcggagctgctgattcataggcagctggtgcttatgaaaatggctgcattattggtattagttatctattgctgtgggacaaattaccccaaaatgtagttacttaatataaaactatacaactttggccaggcgtggtggctcacgcctgtaatcccagcactttgggaggctgaggcaggtggatcacctgaggtcaggagttcgtgaacagcctgaccaacatggtgaaaccccatctctactaaaaatacaaaaattagctgggcatggtggtgcacacctgtaatcccagctactcaggaggctgaggcaggagaatcacttgaacccagaaggcagaggttgtagtgagctgagatcgcaccactgcacttcagcctccagcttgggcaataagagtgaaactctgtctcaaaaaacaaaacaaaacaaaatgatataacttttagaaaaatcgcaagagaaaatcttgaggatctagaactaggcaaagacaccaaaatggaactttatgaaaatgtagcactagcctagggtgagtgtggatgtatcactatttgtggatgtagaaacaggagtagatgagggtgagtcacttgtcctgcctgccacagagcgaatcagtggaagggctaggctttggctcacagcccacacacctagcactgggatgcaccgaggtcaccaccacgcgcctttgtcttccctgcacaccagatgcagccaaacaccaaagcccaggtcagtggcaccggaacaacacatcagtttagaggatttctgatgttattccactttggttattggcagtagagatggttctatctaatgactaagaactggtatgtaggatcatgataacttacaataatgccacctttttctctgaaagtcttcattttctctgctctagatggtaaaagcaatccaggttttgcgcattcatcttcttgagctggaaaaggttaacgaactctgcaaagatttctgcagtcgatacattgcttgtctgaaaacaaaaatgaacagtgaaactctgttgagtggagagcctggaagcccgtactcaccagtgcagtcccaggtacttacatttgggggtctcgctttccctctctgccactgtgaacatctgcattgagtcatgagaccaccagctctttcagaattcactgggtcatctttatgactttctacaagaaggaccctctaggtctctgaccccagcctggtttgggaatgaactccctcagattatgaagtgagtcctcaatctgcatactgggcccccggtcccatgtttatggaaggcacaattccattcatttctttcttttatttcttctgaaaatattttacttattcttttgaaaaattgtgtaaaatacacataatataaaatttaccatcttagctattttaaaatttacagttcaatggtgttaagtttattcacattgttgggcaaccatcaacaccatccatctccagaactttctcatcttctcaaactcaaactctgaccccattaaacactcattccggattccccctcccctagcccctggaacccaccgttctactgtctgtctctgtgaattcgatgactccaggtctctcatgttaagcggaatcgtacagtgtttgtccttctggatcctttgcttgtttcattgtgcagaatgcctggagggttcatccatgcggaagcactattgtgttttagccattctgatgatatgtagtgatattaatatttctttgtggttttaattttcatttccctgatggctaataatgttgaacattattataccctctgtgtattttctttgataaaatgtctgctgcttatgtcttttgccttttttttttttttttttttgagacagagtctcgctccatcacccaggctggagtgcagtggcgcgatctcggcttactgcaaactccgcctcctgggttcatgccattctcctgcctcaccctcctgagtagctgggactacaggtgcctgccaccacacccggctaattttttgtatttttagtagagacggggtttcaccgtattagccaggatggtctcgatctcctgacctcgtgatccgcccgccttggcctcccaaagtgctgggattacaagcatgagctaccacgcctggccgtcttttgcgcattttttagttggatttttttttaacttctgagtgttgagagttctttgcttattgtagatactagttctctgttggatatgtggtttgcaagtgttttctccaagtctatagtagctaagtatttttctcatcctcttaacaggtctttttcagagccagcctttttaattttaataaagttcaatttattaggttttccttttatggatcattcttttggtgtcaagtctaagaactctttgcctaaccctaggtcccaaagacttcgtcttaagttttttcctaaaagtttttaaatagagacaaggtctcactatgttgcccaggcttgtcccaaactcctgggctcaagtgtgaaccaccatgcctggcctcaaaagttttatagttgtccattttgcatttaaatccgtgatccattttgagtggatttctctatagaataactctcaaagctgggcacattgtttcctcccaccctgtgattccttttcaaaattgtttagctgttctggttcctttgcctgtccacataaattttagaatgctcttgtctagagctacaaaaacatcttgcttagattttgataggaattgtattatacctgtatatcaatctggggagaattgacatctttactgcattaagtcttccagtccacaggtatggcatgtctctccattgattgacaactctgatttcattcatcagtgctttgtagtttttgacacataagttgtgtacatgcgtttttagaattatacccaagcatttcctttcctggcctgtgccatctcgaataagagtggcaagagcagacatccttgccttgtcaccgccttaggggacacctttcagtcgctcactgtcgatgatgttggttgcaggtttctttctagatgctctttatcaagttaaggaggttatcctatattgctttttttctgagagattttattttgttcaattttgttaaatgcttttccagcattgattgatatgattatgtgatttttcttctttagcctgttaataatggacattacatggattggttttttgaatattgaacaagccttctattcctggaataaactccacttggccatggcacataattcttttcatatgtattcttgaattctattggctaatattttgttcagcatttttgtctatatttgtaagggatattggtgtatagttttgtttttcatactgtctttggttttggtatcaaaatacacaaacttacataaaatggattgggaagtattccctcctcttatttttttctggagattatgtagacttggtgttatttcttaaatgtttgagaaatagaattgatctatttcacctaagatgttaaatttaggagtttagagttggtctagtattctcttcatagccttttggtgttagcagggtctatagtgatctcttcctgttttatttctgatattgatcttttgtgtctctattttttttttagtcagtctttctagaggtttatgtaattttcaaagaacagtattttgttttattgatttttttggttgtttttctgttttcagtttcattgatttcaccttgatctttattatttcctttcttctgctttcggttcatgatgttcctctttttctaagatcttaaggtggaagctgggatgattgatttgactagcttaacttttattacagcctaattaatgtggcaggctttaagcgtagccactaagcttacacattccgctcgatgatggcccacagaatcaccgccttggggtggcgtccccttatgctatgtaactgctcacatgtcagggcacatgagtgtgccaggcccggcactggaggctcctctcccctgccagctgcccacccaggcgtcacagtcagtggataaagtggcccatgtggatctaaccccagatgcatagagtcctccatggggcatgtagaaacatttgcatggggctcgctgtaggccgggcacagttccaagcactgtacaagcaagaacactggggaaagccaagatcacacttagtccgtgccggggtcaagagtcaaggtgggtgccaggggctgactccccagcacagcttggaatacctcagccctggtcacttctagtgcctcccaggcctgtgctataatctcttgaatgctcttatcggtcagggagagcttggttcatggaaaactcaagagtccaccaagccaagtctaatgaaaaagatgtgtgatcagaaagcagggtcttcctcgatatactcctgggctgtaaggcacgtggaatatggcagtgagatgaagataatcttttggaagccacagtgcaggctgacgttgcaggctggcttgttgtgtttaatacacagttgaacatctcttgctttccgtgtgtgctgcgtgcattctgaagccgcgtcatctgaggatgttctttccctcaagcttctctttccttttttaatggtgtcattatgctacttatgttaaagttttaaacatgggttttccgttttctagtaattccttcaacatgtgtgttctgacttgcagcagattcaaagtgccatcacaggcaccatcagccctcagggaattgtggtgccggcgtccgcgctgcagcagggaaacgtagccatggcgacggtggcaggtacgatgacagaaaaatggacacactctccatgagtttttgcagaaaatggtcctgtgtgttagaatgacagtataaatataatttcaagttcatgccattttctaatatagcaatgttagaagctagaggtctctgaatgcctctttcttgttaatactcaataacaaatattttatgcagattgtgtttctttgtttctctaccaaaaatatattggaaagaaaaaaggttttatgtaggaattgaaaatatacaccaaaaaccagttgtcattttcaaataacatagctttttgttgtgcttttaatagcaccgtgaaaatcttaagttttatcattaattgatgacaaataaaaatgcagtcttagcattggtattacttgtagaacaaaaccgttacaggaaagggacagattccagagttccctgatgcgtagagaacattgaaaacacaaagcatcatggaaatgggacacggcaaagagggaggggtagaaatttacaccaaagacctcacataatagcacaaagggaaacctcagtgggaaaaaaaaaagcaccattgatccaaaaatataactagaattaaaatagttattatttagtacccttggccaaatccttaacatgtgctaattttaggaaatagtagaaagcagaggctagcaaaaggaagggagccctcacaccccaggtcagttggtggtgtgtgagccgggctgtgtgggctgccaggcacatagcgcccacccacctgcccacccactgctgcaggtgcccgagtagcccacccagggagtttgttttgatactttatagtgacaagtcaactggcaaaggattgttgatcttttgaaatgattaaaaagctcatcaaaccagggattttattccttttgtaagtatatcaagaagagggctggtcgcagtgcctcacatctgtaattccagcactttgggaggccaaggcaggaggatcagttgaagccaggagttagagaccagcctgggcaacaaagcaatgtccctgtctctacaaaaaaaaaaaaaaaaaaaaaaagaagaatggtttaaatcattgagacttaaaagcagcctcatatttttattctccctttcgaggtggcacagtgtatcagcctgtcacggtcgtcactccccaaggccaagtggtcacacagacattgtcgcctgggacaattaggatccagaactcccaggtgcgtgcgccattttatggaaggctttgggggcgagtgctgcccacataggggcacaggtagaacaagcatgagcccttccctctgcctgaagagctttgtcttgtgtagcaatttctggtttctctgaatgtcagtgttttgtttctttgtactcttatctctcgcattgtagagaatttgcaaagttcagaaaattctgaaagaacaggaaaaaagtcactcataaccaccccctgccacccacacacacacacacacacacacacacacacacacacacacacacacacagagttatccagtgctaacgttggatcatgtgcacgtgcaccaggggcagaggtcttgtaggcacacactccccagggtccccacaaagggcacggcagaactgccaggcaagcttttcagaccagtgagcctggcccacacctccatcatgacaatgtcattgggccagggctttcaggcctctctgtcacccaggctggagtgcagtggcgctatctctgcggctgctgagccttgcccgtctttggtgtgtgttatcagttcttactttaagaacattgattctgggccgggcacggtgacgtctgtaatcccagtactttgggaggccaaggtggacagatcacgaggtcaggagttcaagactagcctggccagtatggtgaaaccctgtccttaaaaatacaaaaattagctgggtgcagtggtgcacgcctgtaatcccagctactcgggaggctgaggcaggagaatcgcttgaacccgggaagcagaggttgcagtgagctgagatcgtgccactgcactccagcctgagcgacagagtgagactccatctcaaaaaaaaaaaaaaaacattgattctggccgggtgcagtggctcacacctgtgatcccagcactttgggaggccgagatgggtggatctcttgaggttaggagtttgaggcgagcctgtccaacatagtggaaccccgtctctactaaagatgcaaaaattagctggatgtcgggtgcatgtctataatcccagctgctcgggaggctgaggcaggagaattgcttgacctgggaggtggaggttgcagtgagccgagatcgtgccacagcactccagcctgggcaacaagagcaaaactccatctcaaataaaataaaataaacaaaaaaaaaacacacatttttttgagactttgcaaacctaaaaatgagtttattttaatctcatatttgatatgcagtctgtttacttgtagaattctgggttgaaaatcctttctacccaacattgagaaagcattacttttgtttttctgagacgaagtctcactctgttgcccaggctggagtgtagtggtgtgatctcggctcactgcaacctccacctcccaagttcaagtgattctcctgcctcagcctcccgagtagctgggattacaagtgtgtgccactatgcctggctaatttttgtatttttagtagaaatgggtttcaccacgttggccagtctggtctcgaaatcctgggctcaagcagtccgcctgcctcggcctcccaaagtgctgggattacaggcgtgagctactgcacccagctctcaagaaggttggtgttcttttttccaatcttttgtgtttttctcatcttttagaagcttctctttttttgcaggtgctctgatttttttttttttttttttttttttaagagacggtctcgctctgttacccaggctggagtatagtggcacaaacacagctcactgaagcattgacctcccaggctcaagcaatcctcccaccttcacctcctgagtagtgggactacaggcatgtgccaccttgcccagttaatttttaaatgtttttgtaaagacggggtctcactatgttgcccatgctggtcttgaactcctgggctcaaatagtcctcctgccttggcctcccaaagtactgggattacaggtgtgagccactgtgcctggactaaagttaggtttatatgtgaactcttaaacaggctgacctatccatgctgcggaccctacggagcgattttgcttccttccttccttccctggtctgcgcagtgcgcagtggcagcatcatctcagcaggcacctggggagggagacgctgtgtgagggaggccgtgccagggcctggagcacggccttgtaacgagcagatcttctctcgtgttttgtgagaaggaatttaacaaagaaatgccattcacatctttttcttttaaaatgaagttggcagagtagcctacgctttcctgggtgacaggagggaaggtccgtatctctagtgcctgtggaggcgtctggaacaaggagtcagcctgtgccctcctgttctgcggaccctctttctgcctttgtgctgtttctgtttctttcccctctgctcccctggcgtgtcctgctcttgagagttggattttctggtgtccctgttcattctcattggtccttgacatcccttttcggctaggaagtcacatgttctcactgacctcgctgcaggaggcacaggtgggaacaggtggtgggtgagaggaccacggcattcctgcctgcagaggatgggctctgagcctccctgcctgagaggcctctgcagagccaagtcactagtgcaaagacttatcatgtgccagcctgggcaacagggcgagaccctgcctctacaaaaagtagaagaaattagctgggtgtggtgatgcgtggctgtggtcccagctacccaggaggctgagctggaagaatcacttgagcccaggagttcaaggctgcagtgagccgtgactgcaccactgcactccagcctgagtgacagagcaagatcctgtctcaaaaaaaagaaaggctggtcatgtggagggagccgtgtcctgaaacatcagtccacacagggttcccgtgcatgggcctcgactacaatcatttccctgtccgatccttggctgttttctccacctgcagttgtaagtacttggatatgtgagaatttcctatgctttctaatgttatttttcaactttaaaagcttcagttacagttaaaccaagatctcagcatcttgcatcaagatgatggttcatctaagaacaagaggggcgtcctgccaaagcatgccacgaacgtgatgcggtcctggctcttccagcacatcggggtaaggacggctgggccagcccttgccttgcagccctctgcgacgcttgctctctggcttatgtgtcatggaaaagggttacttctctgggctcagaaaatcaaaggcctgactttcaggactttgtggcatgtccataatgtggggagcgtggggcactgctgcagggaacttgaagggcaatgagggctgccgtgaaggagcacccgagcacatgtgaggcgtacacgtgtgtccgagacagcccaccacgaagggtgatggggtcaggtgagccagaaaagtgggcagagaagggatgttcttgggcagcagctggggaagttgctgtgtttctgtgtgttggattaacaaggaagctgagatgggttagagacatcgcagggccgggtgcacccacaggtgggccaccgggtgggtgcctttagctggaagcgagtttgtcccacagggcgcgccgttttgcccagcacgtgtgcacccggcttcctcccccgggccatggccgcgtcttctccctgtccccaggacatcttaggaagtgcagtggtgggcctgcttgctgagttgatgggggagacctgctctgcacgctgtgtggcaccattgctgccagcctgctgatccagggcaggagagagcaggcggggctctcctgggacaagcacagggaggccaaggcgggaaggcagacgccagtttggcttggccctaagtttgcccttctcccctgctgtcgccactgattgttgtgaggctgtggccatatccgcctgtgtcccagcctcctcctcctcggccttctgcactgcatctgccctgccctcccactgtctcctctccagggtgcctccgctggggctgaagcctgtttgtcctcagcactctgtccttgccctcccctgactgtgggcccctgagcccgtagccatctcgccatttcgcggcccactttcctctggctgcctcgggctcctcagttgaggatagggtccatgggagtgactggcctgagggcttgaaactggtgggtagtgttgctgagtggtcctgggaggagaagggccctctcctgggcagaaggcctggcaggagcctgggctgcgcctcttctgcttgcctgccctggcctcttggtctccaccgagccgcttccatgggcataaaaggtagcaagccacacatgtcaggagaaaggcgtgctacctgtgagcagcggggctgctccgagaaattggttcaaagagatcagtcacaagaaaacggaaagatttgtgtgtaagaatgttagtgtcgttcaatataataatggaaagcaggtcggcatgtagatggggacgtactggtttgatggagtatcatatgcatagttaacatgaggaatgagggctctaagcagtcgggaggtttagtgaaggataggaagtcaaaaggcagcatgttggtatatttacacacattgcgattattacagccaatcagtatatgtataacataatgatagaacaacaccaagtggtgggattgggtgagtactctcctttcaggtttcctttaatgttttaataatttctcaaacaataaaccctgcccatcatgtccagtgaagacgccgcgttttttcctgtggggcgtcctcagtccctcctcaccctcgtttcttggcagcgccgaccccctgtagtttcccgcatactctggggcagcatctctggctgtttggtgttttctgcttgtgtgctcgtgtttcctgccctgtttctattttatgagctttttaaagggggagaacagtatttctgtttccatgaccttgagctcagagccacacactcattgatggagtcaagttgagtcacactgccgttagtttgaggaaacaaacccatcactgctgaggcacatctgaggccgctccgtccccatgtgatgggcaggggtgtttccacgccgcactcagtgttcctttcacgtcaaagccaaagtaaactctcactgctgactttgctggtaccgttcattctcttgggtccttgttgatcccaaatcaagggctttagtgcattcaggttttagagtaaatgtcgtgttggtttccacatatagacagtcatcaaccttggagaaattatttaccatagctagaaatcattttcggttggtacttctgtgagttttgctatctagttctgattggattttttttttttatttttctgcactcccaggctggagtgcagtggcgcgatctcggctcactgcaacctccgcttcctgggttcaagcaattcttctgcctcagcctcccgaatagctgggactacaggtgtgtgccaccatgcccggctaattttttgtatttttagtagagataaggtttcaccgtgttagccaggatggtcttgatctcctgacctcgtgatctggccaccttggcctcccaaagtactgggattacaggcgtgagccaccacacctggccagatttttttttttttttcccagatggccaggctggtctcgaactcctgacctcaagttatccacctgcctcagcctcccaaagtgctgagattacaggcgtgaggcaccgcgcctggccctctggttggattttttgtatgtgaaatgtttcaatcatacataaaagaagaataccatagcaggcactcctgtcaccagccctgggttcagttccttactgacagcacaggtgaatccagcagagatctcaccccaggaaagccgtcgatggcatcagcttatcccagtgtcagttgattcctgtggtacccatgatggaaatttgtcccccagcctgcctggccatttcctactccacctgtttcaccagctgtgggatgggggcagtttgtaaacacttcatgcctcagtctcctcttctgtaaaataaagacactgacagtgactgtctcagcaggtgcttctgaggaatcagtgaattattatagaatggaccaaggtaattgaaatgtgctgtgtattgcttgtggcagaggctcccgggccagaacgcatccacccatcctctttatatggatgtagtttattgttcataagttaaagttcaataaagttgataaagaatctatagattgtatcaagcctggtgtagactcaccgctggactgcatagctgctcctcatgatgtcgctgctgttatcgtcaccgctgaaccgttaaacgtggggggcggtctgccttggcctatgcactaaccagccactgcagcactaggacattcctgggacgaggagaaacactttgttcgtgagactacagttaggttttggctagaagcactgttgacgtgaccattattttctaatgattatgtaatgctcacattttgcctaaatcgtcttgatttcctttgtaaactcgaaggccatggtaaccttctttttttattttcagcatccctacccaacagaggatgagaaaaaacagattgctgctcagacaaatttgacactactccaagtcaacaactggtaaggtgccctgcttcctgaaatcatgctgtcagcacggtagagcacttggaaaccctggcaccaatacatggtgaaatcttgctgaaaataggaggtctctctttttcttttttcccaactgagacggggtcttgctgtgttgcccaggctggtctcgaactcctggcctcaagtgatcctcccacctcagcttctcaaagtattgggatcatgggtgtgagtcactgcacccgactaaaaatatgagttcttttaatgggcaatgggagcaggagacttaggaataaaccaggttcaacctaagttttcatatcaatacctcattatggactgcatcctgcctgcctctttagagctgtttctctagggtgctactgtccccaagccccacattcatacaaaactgtgatgtgttgttagtggatgagcctctggatggtgggaggccaagagtgagaggtcctgccccatgaggggaccctctgccactctttcttgtgggggtcctgctccacagaagagtctgggagccattcctagcaaagaaacacccaggaggacatttcataaaacgtccccttctagtcctgctgtcaaacattgctgtggacacttagactctggccagatgtattttcttcagtaagggcttgtgcgtgttcctaggtggcactgaagtggggggtggtcttccattttggttattagtcacttgtcacattttttaaatttacttattcagatgtaggaaacagtttcagcttaataaaactggcatgcataaaagaagaaagcacaaattcttccagttgtaaacattattatctttatcttagctgtgctaaaatgtgaacttgttgaagttccagcaagaaagtctttgtctttgtgcagtcgtgtgtgcgggaggtatgcttcggggttgcataagtacttccatgatcctgcattcttgccattcttttagatgtgggtagtcacaacagactatactatttgcgttatttcctgttaaatcttttaaatagaatattaacaaaaatttaaagattctgagtatgttgttgctgcagtggttgttatattctgctcatgtgcttgttttcctggagctatgtggaaaccacatactttggttggggcacacctgtggtgggtgggctgaagtgggagggatgcgtctctggatgtgctggtgccccgtcactgctcagcaccctcctgcttttctgcattcatgatttcctggtgttccctgacttgctactatgttacattaacgaattgtcttatctaggtttagtatcaacttttaatttttagtaataataacagtttaataatataacttaaaaattccaaatttctgaaatctttaatatttgtagctacttttactttttgtgactttcttttcttttgtatttacaaacattacatcttggagtgagatacacacacccatcattagttcatgcctctgctggtagcagctttgaataagaatgatttaaaaacacattacaggccaggcgcggtggctcacacctgtaatcccagcactttgggaggccgaggtgggcagatcacgaggtcaggagttcaataccagcctgaccaacatggtgaaatcctgtctctactaaaaatagaaaaattagctgcgtgtggtggtgcacacctgtaatcccagctactgaggaggctaaggcagtagaatggcttgaactcgggaggtggaggttgcagtgagcccagatcgcaccattgcactccagcctgggcgacagggtgagactcagtctcaaaaaaaaagaaaacaaccaacacattacagtagcagtggggccttccctcccaggtctcgctggggttgtgggtggccatggagcttgtgctgcagggatcaccaggttcctctaaatgaagcatggcgggatccgatctgcttcattattattagactgtgtgctaatataattgtagatatttttaaatcttggacttttaaaattaagcaaccttagagctgatccagttctagtgttgttgttttgcagaggggggcattaaaaaaagaaagaagttgtcacagtgacaaaccagagtagaatctgagtctaaaagtaatgcttttgtttccctgatatcgtgaacatggctactcagctatccagatagagaagtctggcttttaatagatgagcaatgtgtgactctagcaagaggtcaactactttatcattcatgttactgaaaaaagaagacagaaacgaggccttaagcatggttggtattgctgcttttgcgttaggttggggtaatgcatgaatctggacgggttctggtttgataggcgctttcacgggacagatgttgtttttctttccgtttctttccatttcagctctttttgtagcaaagtggcccagtcagtggcatagggtggtgggtgcagcagaacgcatgtctggtttgctatctttgtcctctagtcactgcaggaggaaaagctggcctagggatttgagtctccttgcactttctcacatttaaaggcaacagctcatagcataagaatgggaactgaagacagcagcctttaatcttaatgtattttgagattgctatcatactcatttgatatgaaacaatgtccagcctgccttgccaacctgtgactgttgggccaggtgcagtggctcacatctgtaatcccagcactttcggagaccaaggcaggcagatcacaaggtgaagagatcgagaccatcttggccaacatggtgtaaccccgtttactaaaaatacaaaaatgagctgggcgaggtggtgggcgcctatagtcccacctactcaggaggctgaggcagcagaatcgcttaaacccaggaggcggaggttgcggtgagctgagatcgtgccactgcactccagcctgtgcgacagggcgagactccatctcaaaaatacagaaacaatgtccagcctgccctgccagcctgtgattgttgctgctctcgttctctgtggagtcttatcacaggcgtgagtgcctggtctgacagagtcgccagcgtctgtcggggatttcatcactgctggtgcctacgtgctgtgctggccacatgtctaggaccactggaggacttacgcctccagtcatctaagaaacagctcatcattgggaatggtttttgaaaagatgcagctcttgccttagatcgtgctttgtggtgaaacaagaggaggtggcagtcccattctctgatggctcagacacgttgccacccagaggctcggccccgttggtgatctggtgacgtccagacgagtgcagactgcccgatcgtctcaggcatgatggcactacagaaagtcttgcttctttaacatttttcttccttagggaaaacagtgtcagattcacaaattcaacagtatcatctatgtcgttatgagtatctagttcacaaacatgccctaaaggagttgagacaaaaaaaaaaatgccatggacgagttggtgcttatttgcatgatttttaaaacaacaggctctgtgtttctgggcatttagagaattcagaagagctgttgagtcctcttaagtagttactatagtggagaacttgagtcattctttgtagcgtgcttcgtagagcagcgtgtttgttagaaggatttgttaatcctgtatagggtctttacgaaggctgttttcatggaagcttctctttgttgactccaggttcatcaatgccagaagacgaattcttcagccaatgttggattcaagttgttcagagacccccaaaacaaagaaaaaaactgctcagaaccggccagttcagaggttttggcctgattctattgcatcaggagtcgcacagccaccgccgagcgagctcaccatgtcggaaggtacaggtggccggccaaggccagacatggtggaccatggggtggggattatgaacaagaggcctggatcaggcctgttagctgtgagcctcaggtaatgtggtgaacgagagtgcgtggttctctttctctgcaactaaaacatgaggaagctgcattctgcgtgcacgggagctctcagtaagagttaggagcaccagtagtagagaatgtaaaacacgtgatagagatatgaaatcattaattctgtctcaaagacacagtcatgcccatggatcttctcctttgcttctgtgtttgctctccttttccctccgacgccgggtgtggaggagggacttaccccgttctcaccacgtggcttctttctcttcatcccccatgcccttctcttgtttttgcttgttccctgtggcctctgctctccatcccctgacgtaggcagccattctgatgtgttttataggcatctttctgttcgcatgaggtcttcatattttggatggttttgtgtgcatgtgtttttatttttttttatttgtttgctttgtttttttttttttttttttttgagacagagtctcactctgttgcccaggctggagtgcaatggcgcaatctcggctcactgaaacctctgcctaccaggttcccgccattctcctgcctcagcctcccgagtagctcggagtagctacaggtgcctgccaccacgcccggctaattttttgtatttttagtagagacggggtttcaccgtgttcaccaggatggtcttgatctcctgacctcgttatccgcctgcctcagcctcccaaagtgctgggattacaggcatgagctaccgcgcccggcccagaaacagtttcttaaatccctgttgaacattccctaaacatatataggtgttttattttaactttaggtcaaacgagcaaacagcacccaattgagtaataaagtgtttttctgtgagtactaatttaaataatgacacaccttcatcctgccgcaggagctgttgtcaccatcaccacgcccgtgaacatgaacgtggacagccttcagtctctgtcctcggacggggccaccctggcggtgcagcaggtcatgatggcagggcagagcgaggacgagtctgtggacagcacagaggaggatgcgggtgccctggcccctgcccacatcagcgggctggtcttggagaacagtgactccctgcagtaggggcaggagcagacgcacctgactttttggagtttgcacagcaaacattttacacagttttatttctaatatgttttatatgtagatatagaagagtgcacttttgtatttcatagtaagcttaaagcgcgtctttgccggtgcagcgacttctttcaagtgtgtgtgtgtgtgtgtgtgtgtgtgtgtgtgcgtgtgtgcgtgtgtgtggatttttaaagaaattctttaaaggtttaacgctagattgtgaggaatgacacaccactccctccccaccttgaatccctaattagattaaggaatagcgctgccattttctaaaccgtgatgcggttgtcacttagttctgtggttccagcagatctcagtgggctggttgatttgtgtggcccatggatttgaaagaagctgctgcacccgaaactgccagtgtgcggtgacaacggcacacgcctagactgagtgtggtttcgtcgtgagtggatggacggcaagcttagcaagcctaagtcccctcatgttcagtgagcctgtttcatttgctatatagaaaaagaaactcctatttttaccttgctggaattattggataaaaaagctatttttataaattcgttatgaattggatgatgactatattgaggataaaatttctagagaagaaacaatacatgcttgctattaatatttcaatttggaatgttctgaattgaccaaatttaatgaacctgcccaaagttagctaccgttccatggttctttgctctccccgggtagtgatgaacatttactactataaaagaaacagctatttaatgaaattttgatatctgcaaatttttgttgatatgtaatgctcagattgcattttacacttgatctaaacatatatcgaaagatatctgctaaacaggacttcaggtaagtgaggtgaaatggtagccagtgacccgttaggagctctcaccgtacatactccagtctaatttaaatctgaccacagttgcatggtcgctttaccatgttagctgtgtattgttttaaaagttttaacttcaaaatatgttatgcacagaatgtttattataaactaatataaaatgtgctctaccccattggctcagagctagggcaaacagcagatattcagactttattacttaactagcggacatccctggagtcccagcagcgagctggtctggcgagggcacctcggcagcccccacgggttggctcctacgtttgcgtttgtggctggtctcctggtgtcagtgttctcttgtacgttgttgctttcgacttttcagagccctcctgctcacttgaccacgtgagatttggaataactgtaggacttctgtttcctggtaacaagatgaaccgagagagtgggctgggttctgttttctttggttttgatttgttttcattgtttacttaggagtggtgctttttctcagaaaacaggccacggtgtttcatacagaatgtcttcatatcatctgaaatggtatggctgaagttcatttgtttacagggtcgggaatgtcttcagttcttgagagtcaacagtaatgattggttgtaagccaagggacattttaagctagtgaagagttttttctggaattgatttttcccaaaagaatatattaattgaggttaagaagtcagtgggaaacacacagaaatttgttttaaaatctttcaggagctttactgaaagacttggttatcaagtcttttggggagagaatgacattttttttttgagacagagttttgctcttgttgcccaggctggagggcaatggtgcaatctcagctcactgcaacctccacctcttatgttcaagcaattctccttccttagcctcctgagtagctgggattacaggcatgcgccaccacacccggctaattttgtatttttagtagagatgggtttctccatgttggtcgggctggtctcgaactcccgacctcaggtgatctgcctgcctcagcctcccaaagtgctgggattacaggtgtgagccaccgcgcccggccgagaatgacatcttaaagccaccattgcgttcctcatttgtgaactgtcttctcatattttaagtcaagtctataagatcatttttaacctaagttccaactttgttggactccttaaaataagcacccatgaaagccagccagcccttcctccttccctcaccaccctccgtctcttcggctgcttgctctttagtgtagattagtggaagccattcacagaatgtagactcatgtataggtcaccgtttctttcccccactagaaatcacattcactaagcagtggattgaatttaagagtgctgcccctgcccggcgcagtagggcgtgcctctagttccagctactcgggagtctgaggcagaggatggcatgtgccaggagtttgaggctgcagtgcactatgcttgcacctgtgaatagccactgcactccatcttgggcaacacagtgagacccccatctataaaaagagagcactgcctgaacctcggtggcactgggaagctctggcctgagagttaaacacccatgctgaatgatacagtgtgcattctctccagctgcaaactttcttcaactttcctaaattcttactaaattcagaggaataggataaagatcacttagagaaagggtgcttatggacatagcctgagtttcctttaacctctctgcaatgggtgcttttaactagcttctacatggcaagctgtttcagtttgcaaaatcactgcccagcatgtttgaggtcagttggcaccttaaaacacctgttctccagcccttggacagtggagagaatctgtaaaagtgtgaccccctctaagatttcgttttaaatgatcagattcggttccagttttattcttgttgagtttttccctatgaaggctccttttgaatgtgtcttgagacccaaattgagcatgttgctgttattcctgccctgcacctgtggagcaggagtggcagggctggctgtgctgggttccagctcgctcccaccgagggactagcttggcctttgcgctttgattccagatagtaagatgagtggaagtgtttatcgagcatgcaaaagaaaccctcacggctaagggctctgggagttgtgtctgtgtgacctgagagtgatccatctcctgcctgtgtgaggtagcagtgggcacttttcattgagacaaactccagggtgtccagagggggttctgccccttgtgaaggcccattcctggcacttagagacagaaagaactcagcaatctttcgttctagttatattcggtctttgaaactgacaatctttgaaatgtgaatactgtaacaatatgttttcttggattgttgtctttaaaaaggatttttgtgaagcaattgatttatcaaagcaaaaaaattaaaaatagaaacttgctttatggatgttttattttataaagctcatgtcaccaaaagctgcttctccattttatgtaaaacattgagaatgttttcatgttttctggtgacatgtagggtctgtagtcacccctgcatattgagaaactaggaccacactgcatcggactagtcaggtccatttacatgtccaagaatcttttcttaaattccttactttgttcattcattggctgttcaggcagaaaatggaaacaggtagcttttatgttttttattatagttttccacaaatctaattattttgatagttacaagaagataatgattcatcagtaagctaacataatccctttcatagttcatattataaattttcatgacaagaaagttcctgaagatttaaaaggtacattaaaacaatttcagagggtttttaatctttgttgtccagagtgttataactcccaacaactgttcatgcttagaggctaaagtcagcagacttagtattttaaaaaccacatgcaaaattatgagtcttgttggtaattagtagtgacagctgactgtattgtttcaagcaatgttttcattggttacagaaaactgaggcactgtgttgtatttccagctcccttagttcagaggtgagaggacgggcatgaactttattaatgtggggcctcaggcagccccagtctctctaggcttccagggcttcatttatgaaaaggaagaactggcttataaggtttattctagccttacaatgatgtttatgactaataagattctatctctccatctaaagactgatgaggaagtgagtaatggtctagcaaatccagaaaataagaaatatttggattaaatatttagtgtttcacagtttttgaattatatgaatgtcataaacaatgtctactgtttttagctttcatgccattctattatgtatactctcagaagaaattcttagtacaaggccgggcgcggtggctcccgcctgtaatcccagcactttgtgaggccagggtgggcggatcacctgaggtcaggagtttgagatcagtctggccaacatggtgaaaccccatctctactacaaacacaaaaattagccaggcatggtggcaggcacctgtaatcccagctactcgggaagctgaggcaggagaatctcttgaatccgggaggcggaggttgcagtgagctgagattgtcccactgcactccagcctggggcatagagcgagactctgtctcaaaaaaaaaaaaaattcttagtacaaattatttttgcccttgtacagtgggatatttttaccttcactaagacctaggatagttgtttaactatcattgtttataaaatctgcgagactagtgactatatagcatctaagcacatgtgactgaaagcagtgaatgcccggggtggcatctgggcctggggccagcttttcccaatcccacgtcttcaccatgcagcccaggtcgggtctggcacctgcaggctcctctctgccaggcctcctcaggtctggcttttgtagtctataaaggactagttagtgttgcttacttggataatttgtaagtattctgtataaaaatcgtatttagaaggtattatcttatacagatgtttccattctttatctcccacagcaacccacactctcatggcttctgctgcgggaagcgctccttcctgggattccctggcacagttcagatgagtatttctccaccttcactggctgctctcctctagctccacagtctctacaacccaggtctacactaacacacaagacaatgtaaactgttaagggcttcacaacttatttctgacatggattgctgtgttaagataatatgaaagaaaactcagtgaatataaagtaaaatattttaaaatataactgatttttctacaggccattttctaaaaatgtctaagcagctaaggacttcaaccctgtaaaaagcaagaatggttttaatataaatcaggaattctagaccgggcgtggtggctcacacctttagtcccagcactttgggaggccgaggcaggcagatcacctgaggtcaggagtttgagaccagcctggccatcacggagaaacctggtctctactaaaaataaaaaaattagtcgggcatggtggtgggtgcctgaaatcccagctactcgggaagctcaggcaggagaatcgcttgaacccaggaggtggagattgtagtgagccgagaccacgccacttcactgcagtctgggcgacagagcaaggctctgccccaaaataaataaataaataaataaataaataaataaataaggaattcttttattccagcatctttcaaaagaaacattttaggctgggcgcagtggctcacacctgtaatcccagcactttgggaggccgaggccagtagatcacaaggtcaggagttccagaccagcctggccagtatggtgaaaccccgtctctactaaaaatataaaaaattagccgggcatggtggtgcatgcctgtagtcccggctacccgggaggctgaggcaggagaattccacgaacccgtgagaccgaagttgtggtgagccaagttcacaccactgcactccagcctgggcgacagagcgagactccgtctcaaaaaaaaaaaaaaagaaaagaaaagaaacattttaatgacagctttagttgcttagacatttttagaaaatggcctgtagaaaaatcagttatactttaaaatattttactttatattcactgagttttctttcatattatcttaacacagcaatccatgtcagaaataagttgtgaaacccttaacagtttacattgtcttgtgtgttagtgtagacctgggtcatagagaccgtggagctagaggagagcagccagcgaaggtggagaaatactcatctgaactgtgccagggaatcccaggaaggagcgcttcccgcagcagaagccgtgagagtgtgggttgctgtgggagggtagatggcaggaggacatggggctgggcagccgggagggactcgtggcctgggagacagcagtgaagaggagaggggagagcagaggcaggcgccatgggttctgggcatggccgtgagccactggaagatgatacgggagcttatctttgttcccttggggaagaagcccttattttgagacctcaaaggcataaatcctaaggcaaaatatgggtgatttggccagatcaaaattcagtttttctgtgcattggaggacacagaggaccattaacaggtagtgactgagaggagcactttcctcgttccttctttttaatggataaagccggcaaggagccagtgttagggggattcctgcaactcagcaggtaaccaactagaagtctctagaaccatgacagcggatattaatagttcattgaaaggagaccagatgaccaagcagcacgtgaagactgcacggcctcgccacgcccagggagtgtgagctggagcccaggggcgtgccgccccgtctgccggccgcaatgaggaagctgggattggggatctgcagaaacgggaacttgcgtggtgctggcgggaatatcacggggccagccattctggaatgaacctgacaggacagtcatgtgtcacttaacaatgggctgtgctctgagaaatgcctctgtaggggactccatcccgtaggaacatcacagcgcactcacacagctcactgtacacacagcctgtgcggcttagcctattgctcccagccatgggcctgtgcggcacgtgaccctgctgactaccctgggcaatcgtaacataatgtaaggatttgtgtgtctaaacagctaaattggccgggtactgtggctcacgcgtgtaatcccagcactctgggatgctggggcaggcagatcacttacgctgaggagctcaagagcggcctgggcaatagagtaagacttcatctctacaaaaaaatgtaaaaattagccaagcatggtggctcatgcctgtagccccagctactcagaggctgaggtgggaagatgtcttggactcaggagggaaaggtttcagtgagctgtgattacaccactgcatgccagcctgggcgacagagccagaccccgtctgaaaaaaaaatgctaaacaaaggtacagtaaaaatacagtctaaagtgttaaaaatagcaccgggcacttaccaggagctgctcggatgcctcagggagtgagggcgagtgagcatggaagcctaggatgttaccgtatgtacttacgtgcactggcagcaccacaaacacgggagatacactgtgctacatgttatgaggacagggacttctcagctcctgttgtaacctcacgggacctccttggtctgctcagtccattgttggctgaaacatcgtgggtagcacagacctgtgcagagacgctcactgcagcctcgcctgtggcggcaggggttacagaagcggcgtggacacccctgtggagggcaacggggtgagctgctgggcgtgtcgtgggggtgtggctatgtgacagttggcacaggacatgcttgggtctacttctgtcaacagctttatttcgtggcagtggattgcctgttgtttctctcatagtttattgaatgccggggtttttttgtagaatgtggagaccaagataaatagtcctcatgcccagaaacaggcactccccttcagacaggccctgggtgggtgtggtcaccaggtgagcgggctgtgggcttggggctgccttcgtccctgcaggcaccacaggcttccgattcttccagcagtggccatagccagcctgtgcatggtgtgggtgccagagtggccctgccccttcttagatgccagcaggccttggatgctgtgctgtgcctggtgtctgctcctgccctccctggcagagggctactgctgcttgcttccggctccttggcgtgctcctggcccagcctccatcgcaggtgggtcctatacccttggggtgcagggctcgtgcccactcctgctcctgctgccaaactctgccttatacctggacagtggcttgggcgggagagtgtctgagccagggcaggccttgagttgaaaatgtttcctgcctctccccggtggctctgtacctggtagaaggagggaagaggctgcaggttccccattccctgttttctcctttcctgccctctggcagctgccaaactcggggtgggcggggaggcctttgccctgcgctccggagtgcacacagagctctgtgcatggtgtgagagttcaacagaaacgggaatgaggaagggggaacagtcgggtttggaaatggtttttactcagagttgaaggcactgccttttaccttgagcaacgtaaagctgttctgattcctgattctctgtatggaaggattctctcgggcagtgtccagggtcttatggcaggaatgacatctccagtcccctgtccccctctggaattttgcctatccaggggatccccctctcttgaccctggggaggtttatgtggcctgctggggtggcaattgccatgtgactgacgggttgagggggctcaggcttggcccgggtgccatgttggaaggaagcccaggccgcggggataggccatgcaggtgtgctgtctgccagccgcgttgaccaccagctacacacaagtgagcctacaggtgcctcgagccaccccagctgatgagcagagcagagcagagcccagccgcccctgtgagccccgctccagatacagatgtgtgagcaaaataaatgttgccactgtctgaagccatttttctgggggttgtcgttaaacaggcttagtgcctgaggcgggactctgtggccggttctctgtcatgtcacattggaccttggcatgggccatgcccgtcgtgtgctgggcatgtgctggaccatgtcagccctgcaccagccttcctggggcctgccatggacccacgctgcccgccggcgatgccgtctctggatccagtcactgagcggggggtgttagacccataaagaagcaaagtttagggggagcttggaagggagtgggctgccccgggcctcttcacgcgacgccaacgccaccttggtgtgagccaacagagagggctgtgccccaggtgtggggttgcgggcaggagctgcccactcaggctctctgaggcgtctttgagtcgttctctctcagttcagacttccctccgacagcttcccaaagctttgatggagctgtcctgagtcacctgcacaaccttgctagctgcagcctaaggagacactgagcgagcacacggttcacatttctaaaatgatgctttaatcaaatatgttaagctaactctttttttttttttaacagagtcttgctctgtcacccaggctgaagtacagtggcacaatctcggctcactgcaacctccgcctcctgggttcaggcagttctcctgcctcagcctcccaagtatctgggattacaggcgtgtgccaccacacccagctaagttttatatttttagtagagacggggggtttcaccatattggccaggctggtcttgaacccctgacctcaggtgatctgcctgcctaggcctcccaaagtgctgggattacaggtgtgagccaccgaagagaacactttttaaatgttatttcggtgccagtacttgcttcaattaagcgctcattagttaaaaagaatgctagcctccatctgagccccaccaaggcctcactgtccttcctggcgggagaagccagcggatatgcccttgagctgagggctgtcgaggatgtggtggtccagggcatccctggactcactgtctgacaggcagggacagcccctgcagaggaagaggctgaacactggacaggggtgcctgccactccacagggcctgtccagtgcctatcctggtgggtgagtagcaggctcgctgcctactccgggcccaccaccaccaccagggctgtgctgcaggttgcaaaaggcccagcggcgcccgagccactccttatctggtgaggaagatgcccagacacagggcagctctcagcacgggaaaggaaaagcctgacctttgggccacatcacagacacctggttgatttaataagactgaatcgtggccgggcatagtggcttaagcctgtaatcccaacactttgggaggccaaggcaggtggatcacttgacctcaggagtttaagaccagcctggccaacatggcaaaactccatctataccaaaaatacaaaaattagctggcatggtggtgcatgcctgtagtcccagatacttgggaggctgagatggtaggatcactcgagcccaggaggtggaggttgcagtgacccaagatcgtgccactgcactccagcctgggcaacagcaccagaccttatctcacaaaaacccacaaaaatcctgaattgtaaagccactaatagactagctctgcaatgaagtactcaaagaaaggattagaaacccagtgttcctcagatgcagtctttaggacttaaataacttaaacggtggcctgtaatgagctgcacctgtgtccctgtgagggtgcctgccaagcctttgaagccatgtgttgtcttaggcgggttgcatgtcttcttgcactgctgtttttgctagacatttgctcacaatccttttttacatttttaaacaaatagcacaaatatgaacttgggctcggaccaagacagtagttctgagcttagtgaaattcacagcactagggtgaagtgactgggcacggcagtctcttgctgacagcctgtccttttatttgacatcatccttcgcctggctcctgctgtcactctcttgcgtgtaggtttttgtaagcattggcactttcaatgatcccttctggaaaccagccccccgcctgagctttcaggaatgtatctgtttccaccacctttcagcgattcttcctgctccctctgccaaggtctgtttctccaggatcggagggggtcgtgtgaatcagcccagatgctttcagcagtgaacaagaggccccagcacccggcttccgccccggggcgttggttctctggcgtctctgtggccatgggatgccaccatagcagccagggccacaccaggggatgctgttgctcccagccctctctgcagagccccgggacccaccctgtgtggactgctgaggtcacatgcccacccagactagtgactggccagggaatggcatgtacccattggcttctgtcaactgaggtcaatccctagtccctgctcctgccctcccatcatcgtggctgtgggaagaggcaaggagacctgaactgtcgggaatgaggaaggggatggatgctgagtagatcgacatccatgaccctgggtttcctccttcccccacctcgagagctttggcaagattagacaagtatgtaaggagaaggagcgggactggctcccctgaagctgagcagtcagggcctgaatgatttgaatgggatccaagtaaaccccatggccccacatggcagagtctttgcatggaatccagcctggactcacgaccctgctgcctcacaggcctggcacagcagtgcctgctagttccttgcctctggtgggtaggggactgattggtcctgctgatggcagcagcgggctgtctttggagcaaagttggagctaagttcaggtgctgtcatagcctgactgggtgtgcacatgcttggggcaatgctgacacgccagccccttgccacctcggccccctctggactttgggcactgataagcattaggaggaaagccaagtgggggctgagggcagcttgctgctggcctgcaggcacccttgacacctacagcccgggcatcatgaatggcagcaggaggcagataggttcctgggtggaagggggcaggttcttggtgaggccccaccttcaggccaagaagggcttgaaggctgggggccaggctgccagtcctgtggactggagtgggaacttatggtgcctttttcgggcctgcccatggccacccttggaccagttggcacagcatgcacttcctcccctttgaggcccataaaagccccaggctcagccagagctgggcaaatgttgggatgaccacctgcagacaggagcaacccactctagggccccctctttgctgaaagctgcagagatgatggaaagatgacagggagatgatgggacgaccagctgcagagaggagctaccctctctactgatagctgaacacttgttgggacgacttgcctaaccctttctgctaggagctgaacagacgttgggacaccctggctgcagaaaggagctgcccccctgtgggtttcctcagagctgttctgtcactcaataaagctcctcttcatctggctcactctccacttgtctgcttacctcattcttcttggacaagaactcaggacctgccaaatggcgaggctaaaagagctgtagcataaacagggctgagatgtaccctttgcttgccacattacaggtgaagtgaaggagagaagagctgcagccctttggggaacccagacctgggagctccccaagccagggctgtgattccttctttggggccctgtggttcctggtgtctctaaacttttgggtgccaccgtgttccccagtgccagctgtggaagctgcttgcagtgtgcttggtctggccgaagcctcacagggagccggcacctatagctgcttgccctgctgaagcagctggcacgtctgtgtgcagtggccagaccccacgcacgctcaaacacgcctcgccattccacgcctgactcgcccttggtaggcatgggactcaggcctgtagtgtgagcctagtgcagcctgccaggccaagtgggtgagatgagcccagcaggcctgagcaaaggtgccccagccacagaggttttggccagaaaaacgacagcctgaagatctcgtaacacagcggcattttctctcccagtttgcagtgctcccccatctcggtgctgtggggtctgcttgcagctcagcgtctgttcgagcccatctgttcacacgctcctgtcatcctcctgtgtctgtgaagtcttaaacctttagttaagtcaatacgtgttcggtgagatgcgattctctatttcattcactaaatcaagactagctgacatgtctttgttgttattccacgttacataaattctacgttatttctaaacgtaaaaaataatgtagctgggcacggtggctcacgcctgtaatcacgcctgtaatcccactttgggaggctgaggcaggcggtcacaaggtctggagttcgagaccagcctggccagcatggtgaaacccccatcttttttaaaaatacaaaaattagccaggcatggtggtgcatgcctgtagtcccagcgactcgggaggctgaggcaggagaatcgcctgaacccgggaggtggaggttgcagtgagctgaggtcgtgcctccagcctgggtgacaaagcaagactccgtctcaaaataataataataatgttaaataaataaaaataaaaaaataatgtagggaacctttaaaaatcctgaggagatagcccacagaccactcctggcccatcttgaccattgatgctggcctcatgagggccaggtgtgtgctcctgggcgtgggcccagggagcctgcaattttgaccctaatggggaccgatctgcacagctgagccagcctctctgcagtccccatcccatccatggcaagccccccatactttcttctcatggtcaagggtttggtgacgcagctatgagcaactcctgctggcctgtaaagctcctctgtcctccaatgttgtggcctctgctgtgagaacatccgtcaggagacagtgaagacctccacagctgggggctcagtgggtccagagcattagcgccctgacccaggggctgacccaggccctacgtcacgggcatgtgtccccggctaggaagtcctgagccagccagggtgctcctgcaggagacagcaccagctgaaccacagcttggcctccggggaggactcacaggccacgaggtggcggtgcttgtggctgctgtgagtgcctgccccggagaggggctgtgtctgtgcgctcaccagcggctccagagcctgccgggctcagcaaacagacattatggtgccccgatgggtgagcagccccatgcacaggtgtgtacctgctgactgtgcggaattgtgactctcaggacacttccgtaacaatgaccattttgactgcattgagaatgactagccttggccacttcccctgcattttgcatggagcccagggcccagctcactccgattgtgacggagcgtgagacccttgcagacagccaggggaggtggcagcctgagactgctgcagcagggacagttggcatttagcgtcactcttgaagatcgtttttgagaatttgggtgtttggggtttttagtgtggcctcaaatagattgagttgtcaatgctacagctccggagcctcagctgtttgtgccaccccacactggggtggatggggccgtgccctgccctccctgaggctcactcactgtgcccctctcctggcttctctcctgcctccctgatcagcaagttcctaggggctccccgaatatcatcactccctggagccacagagaccctcacagctccctgcttggggctcctccgcatcccgcacaagctcccccttcagttcctgacgtgtacccctgccctctgcaggtgctatgtaggggccccgccagcctccgaggcccacaagggcttctggttcaggaaggctctgtggttacctcaactccaaaccctctccacccccacccccaggcagcatgctggcaccctagccccgggcaccctgagaacaccaagtgccgtttcctggaagaggaaatgtttctgccaagaagtttccacgcctctggcctatgattgactgacttgcttttgaaacccgttcaggagaggtcatgcctatccccttcctctacccgctggcctgccctggctcacttggctgcatagtgggaaacaggaacttttccactggccctaagcaaagcctactctccagagactggcagaaaaccaagtgcctgaggagagttgggtgcggggaaagccggaggctcccgtggggccctgtagcgggagtgccttcccagtcgctctgggaagccctgccctctcctcctcccacctgcctccctgccagtgtcctcccccagcagacctgcaggaacaacaccgtcatgggggcccgagagtcggggacctcccaagccagcactacagcccagcacagatgccaccaacctgtggagaaaagcctttgttcgtgtccacagcggctctgtctccatcctttaggtagcttgataccagggcataattcaagccattgctgagatgcccagagaccaagaacatgaagctggccaggcttggtcattaggaaagccctgggcaccaagacctgccccctcacagctgctacagctggctggctggctggctggatccttcagggtggggctgcagtcatcgtttcatgagccacagccaagaggtgtcataagcagctgcagaggtttgtggaggacatatgaacagccacccatctgcagtcggggctgctgtggacaggtgtgcaggttgtgaacggcacaactccatgcctccatgccctcagagtctacgcctggatgggcacgtgcagcaccccgtgtggacttctcagctcccctccgttttcagtgttcctggctgggcaggacgagcagatcctgcacaaagagcagccctcacccccatctgcagtctgatctgctcccctccgtcctcagcaggcccctgcacccccgtcctcaccctccacacctccccagccctcccacctgcacctggactgcaccagccacactcctgactcaggcgtttgcccacctgtgccttcagccaggcatgcttttccccagggcccgctgggcacccctgagcctctgcccagcctccgctcagataccacgtcttcagtgagggctgcccccacctacgcactgtggtaaaatgtaccatcttaaccatttttttttttttgagacggagtctcactctgtcgcccaggctggagtgcagtggcgggatctcggctcactgcaagctctgcctcctgggttcacgccattctcctgcctcagcctctggagtagctgggactacaggcgcccgccaccacgcccagctaatttttttctatttttagtagagatggggtttcaccgtgttagccagcatggtctcgatctcctgaccttgtgatccgcccacctcggcctcccaaagtgctgggattccaggcgtgagcagccgcgcccggccccatcttaaccatttgtaaatgcatagttgagtagggttaagtacgttcatgttgtgtaaccatcaccaccatccatctccagaactttctcactttcccgaactgaaactgttctcagccaacaatgattcctcatccccctcctcagcccctggcaaccactgttctcgttgcctctctgagttcagctgttctagattctttacataagtggggtcacgcaggattcgtggggtcatgcagggtttgtgctgttgtagcacgtggcgtggtttcattcctttttaagctgaatcattgtccgttgcccggatagtccacattttgcttctccattcatctgcatgaggtagatcttatctccatgtctagatcttatctccattttgtagacatggaaattgggacatattgcccaagaacccccaactgataagtggcagagtttggattcaaacccagatcaaactgggtccagagttgtggcttttttccaggctcgtccagcaagtgccaaggctgggaggtgctcgtcaacaggcactccatgttggccaggctggtctcgaactcctgactcaggtgatccacctgcctcggcctcccaaagtgctaggattacaggcgtgagccatcacatccggcctaacaggcactctgtgcacggtgtgtgtgtgttgggggtggggagtgctatgggctagattgtgtcccctcaaaactgacatgttgcagacctaacccccactacctcagaatataaccttatttggagacagggtctttaaagaggtgattaaagctaaatgaggccattagaccctaacccagtgactggtgtccttacacaaagggtaatgtggatgcagatgcggagggagaatgccctgctaggatgaaagtggagaacaagggggtgcttctccaagctaaggaccaccaagcagggccagcaacccgcagaagccggagaggcctgggacggaggttccctcagccccagaaggagctgtggcattaaagagttcaaactcgctgggtgcagtggctcacgcctgtaatcccagcactttgggaggccaaggcaggaggatcacttgagcccaggagttagagaccagcctaggcaacatgtaaaaccctgtctctacaaaaattagctggtgtggtggtgtacacctgtggtcccagtgattcaagaaactgaggcaggaggatcacttgagcccagatcaaggccccagtgagccatgtccacaccactgcaaagtgcgagaccctgtctcgtaaaaaagaaacactataagctatgcactaccttgtacggaaaacgttgcaaccctgtcagacttctcttgtctctgcctctatgtaagcgagaccttcccttcccactctggagcgctggcccattcttttcgagtctgtttcccgagtgatggttcccaagctttaagcttgaataaaccctggacttcactgtattttatgaatctcattattcagggttgatggaaccatccctgccaacaccttgaccctggacttctggcctccaagtctgtgagacagtaagttgtcgaagcacccactgtggggccctttgctacagcagccctggcggactcacactgggccacacggggaaaaccgaaggggaagctcgagggcatttagggcccacctggatgatccaggagtgtctctgcatctcaggagcctcagcttcacacctgctggactctttttccaaagagggcccattcacaggtttcagagattagggcctggtagctttgaaggaccactgttcagctcaccagagctctactgtttttagaggggaggggcggacagggtctccgtctgccagtcaggctggagtggcgctcacctataaacttacttgcatccatatgtccagaaacttgcttgtgctcctttcctgtctccctccttttcttccttccttccttttttttttttttttttttttttttgagacagggtctggctctgtcacctaggctggagcacggtgatgcaatctcggctcactgtagtgtcgacctcctaaacttacgcaattttcccacctcagcctcgcaagtagctaggactacagggcacactgccacgcctggctaattttcgtatttttagtagatacggtgtttcctcatgttgtccacgctggtcttgaactcctgagctcaaacaatccacccatcttggcctcccaaaatgctgggattataggtgtgagccactgcgcccagctgcttttttctttttgtaagtatagatgttatctatcaacatccttctgtggaaaaatgaagattcttcctctcccatgctcctccccactagtaggaaatataattccattctcggattccttcaggacagttttataattgagaatagattaatatccagtgtttacacgattatgatgaagcaactattattcctagcctagtcatgttatgtaattacatttcttacagagctccaatattttctcccctttttttgagacaaggtcttgctctgtcacccaggctggagtgcagtggtataatcacagctcaccgcagcctcaatctccctggctccatcaatcctcctgcctcagcctcccaagtagctgggaccacaggcacccaccaccatgcccagctatttttaatagagatgaggtcctgaactcctggactcaagtgtgtgtgttgagtcgagtcctcccaaagtgtgtctgctttggcctcccaaagtgctgggattacaggcatgagccaccgtgcccggcctctttgttttctaggttctgatgcaactcccaactctccaccaggcatgcagatctcttgataggctcacagcactctggcgacctcttgatttccttatctcccctgaagcatcactcctgtcttttttttttttttttttgagacagggtatcactgagtcatccaggctagaatgcagtagtgcaatcatggctcactgcagcctccaactcctgggcccaagtgatcctaatgcctcagcctcctgaggagttgttttcctttcttttttcttgtagagacagggtctcactgtgttgcccaggctggtctcgaactcctggcctcaagcaatcttctcgcctaggtctcctctgtcctactgctgctggactcacagtggccctgggacctcctgtgacaccatttcctctcctgttttcattccctccttttggtggcgtgtgttcctgggcagaaagcctgccctgcatgatggaagtgggtctcctgcctccggtgctaagggagagggtgctggcctcagggcttccagcctgcattccttcctcttctgaattccgtcagggttcatctcctggtttccatgtgtgctggaggctgaagttgatgcctttctcatcccaagcctccctgtgtgagctgggcttttcatccttttttgggagtgttttagacttctcatgtcttgagtgacctcacatttcacagtgatgttcactgtgtagatctttcgcggtccattttgctgggcactgggtgggcctctcggtctgcaaagtcatgtctttgagttctggggcagttttgtgaattacttcattactgagatccttccttgttttctttttggaactcttacttgccacgtgctgggatccaataagctcaaagaatttcacacacaaaaacataaggacaaatacatcaggatacatcataatttccaaaacaacattgtaaaagaacaaagctgtaggatccatactttcaatttcaaaacttactacagaactatagtaatcaaaacagtgtggtaccaccataaggccagacacacagatcaatggaatagcactgagtctagaaatgagcccatacatctgtgagcaacggtgccaggccattccatggggggagcatcgtctcttcaacaagagacgctgagacagacagacatccacaaactcccatgttaaaccatctacaaaaattgactcaaaatcgaacaatgagctaaatctgtacagatcttagaagaagacataggggtacatttccatgaaccttggatttgccaatggatatgacacccaaagcatgagcaacaggaaaaaacaaacaaacaaattttgactccaccaaaactaaaaactgccgtgcatcaaagaacattaagaaagtaaagagaccgggaccaatggctcacgcctgtcaccccagcactttgggaggccgaggtgggcagatcacttgaggtcaggaattcaagaccagcctggccaacatggtgaaaccctgtctccactaaaaatattaaaaattagacgaggcgcagtggctcacacctgtcatcccagcactttgggaggccgaggtgggcagatcacttgaggtcaggaattcgagaccagcctggccaacatggtgaaaccctgtctccactaaaaatattaaaaattagacgaggcgcagtggctcacacctgtcatcccagcactttgggaggccgaggtgggcagatcacttgaggtcaggaattcaagaccagcctggccaacatggtgaaaccctgtctccactaaaaatattaaaaagtagacgaggcgcagtggctcacacctgtaatcccagcactttgggaggccgaggcaggcagatcacaaggtcaggagtttgagaccagcctgaccaacattgtgaaaccccgtctctggtaaaaatacaaaaattagccaggcatggtggtacgtgcctgtaatcccagctcctggggaggctgaggcaggagaactgcttgaacctgagaggcggaggttgcagtgagctgagatcacgctactgcattccagcctgggcgacagagaaagactctgtctcaaaacaataaaaaatacgaaacacaaaaattagctgggcgtggtgttgggaacttgtaatcccagctacttgggaagctgaggcaggagaatagcttgaacccaggaggtgaaggttgcagtgagccaagatcacaccattgcactccagcctgggcaacagagcaagactccatctcaaaaaaaaaaaaagtaaaaagataacctacagaatgggagaaaatatttgcaagtcttatgataagggcttagtatcctgaacatataaagagctcctacaactcaacaaaaagacaacccaatttaaaaacaggagatggattctcccaaaaaataaccaacaggcatatgaaaagatggtcactcaacatcaccaatgattacagaaaggcaaatcaaaaccataatgagacacctcttcatacacactagcatggctataataatttaaaacaagaaaatagcaagtgttgataaggacctggagaaactggaaccctcgggcactgttggtgagaatggaaatcggtgtgaccagtatggaacacagcttgatggttcctcaaaaaataaacatggacgccgggcgcagtggctcacgcctgtcatcccagcactttgggaggctgaggcaggtggatcacctgaggtcaggagttcaagaccagcctggccaacatggtaaaaccctgtctctacaaaaatacaaaaattagccaggcacagtggtgcacacttgtaatcctggctactcgggaggctgaggcaggagaatcgcttgaacccaggaggtggaggttgcagtgagccgagattgtgccattgtactccagcctggcaacagagcaagactccatctcaaaaaaaaaaaaaaaaaaaaattaaacatggagttaccacattaaccagcaatgccactcctgggtacacacccaagaaaagtgaaaagaggtgtccagacatactcggccatgaaggtgcacagcaggttactcacaagggctgaaaagcagaaacaaccaggtgtccatcaccgataaatgaggaaccaaaatgtggtctatccacacaatggcttattattcggccacaaaaagaaaccaagtacacgtgctctgacatgcctgaaaataccatgcaaagtgaaataagttagacacgaggccacaattgtgtgattccatttatatgaaatgtccagaacagggaaaacctattttagacaacagagacacaaagtcgatcagcagttgccaggggaggaggaagacgggaggggaaatgattgcttcacggggtgatgacagaatgttccagaacgtgacagaggtggtgcctacacaactttctggatgtactaaatgccgctgattgttcactttcaagtgattgatttttaggttatttgaatttcatctcaattaaaaaacccaaacacgcaaactgctcccgccagctcagccccgagcagacggcgcagcccgtggaggatgctgagccacccaggcttctccccgccccttcctggactcttctctcttttgcctttaatccactctgcgcagtcattgcctgtgttcatcctacctggccgacttctctctcaatatttccttggtgaaacatcctaagaggaagttacattagagaaaatcacatatttcatctcataggccgtaaacagggccatttaggaagccatgtgttaacgaggggagacggatgctctgtgccgtgtgcagggataacggtgccaggccaggcagttaccaatcacgcgtgtgtttagggctcaggaaagcgaaggagaagtgggcaagggtggcgggcccgctccgcaccgcccagcgctccggacttcacttctggtcccgctcctgggcggccacgaagttcagcaagtcaatggcggtgaccaccccgaacaccatctgccgctgactggacttcccggtgctgtggtctgaggggagaacgaggcagtgggtttgcaggtgccgtgggaggctgggtgggctgctgcggggcaggaggctcctgagggcctggggcacctgtgcaccatgggggcccagggtggctggagcccagcggcgaaggctgtgttcctttttttttttctgagacagggcctcactctgtcccctaggctggagtgcagtggtgcagtcttggctcactgcaacctccacctcctgggttcaagtgattctcgtgcctcagactcccgagtatctgggacttcaggtgcacatcaccacacccagctaatttttgtatttttagtagagatggggttttgccatgttggccaggctggccttgaactcctgacctcaagtgatccacttgcctcggctcccaaagtgctgggattacaggcgtgagccactgtgcctggccaagccagtgttcttctgacatgagccccatgagcccccaggccaggttctacccaccacgtgagtcccctgggccccaggccaggctccacccaccgcaggtcaggacacacccttccctggcccaccggctgagctcctgaggcactcatgacttcagagccggtgtgggcatgaaattcaaacccgcttacagggccgggcacagtggctcacacctgtgatcccagcgctgtgggaggccaaggtgggaggatcatttaagcccggaagtctgggaccagcctgggcaacatattgagaccctgtctctacagaatatttttaaaaataaattagtcgagcatggtggcacacgcttgtggtcccagctacttgggagactgaggcagaaggatcagttgagcacagcaggtcgaggctgcagcgagctatgatggcactactgcactccagtcggcaacagagcaagaccctgtctctaaaaacagacaaaaaccccttgccaccatgggcagcacacagcttccatctctggcctgattctgtcttcacccctcctgctttctcctggcaagcgtagacccggtgttaatgctggccgaggctcccatgccacatacccagacagggctgttgtgatggttaattttaatacagattaacggggccgtgggagcccaggcattggtcacacgtcgttctgggcatgtgtgaggggattccggattagcacaagagtcaagaggcagataacgtgtgctactgtggagggcctcacccaagcagttgaaggcctgaatagaaccaaaggtggaatttcctgccttggggcttgaactgctggctctccagtctccggcctgccgcctcaccctgcagatctcagggtttgtcagcctccgtgatctcatgatccagttccttaacacagatctcgttccctctctctccccgctccccacacatcctcttggtcctgcgtctccacaggaccctacaccagctgtcatgaggcacagaggggtgagcaaggtgcgggtgaggaagagccctcggagcccgtcccaactccgccacggctgtcactcctctctttgtaggcagaggtcccttggggtggcccacttagagccccaggaaaagatagggaacacagatgagatcagctccttgcattttggggaaacggaggcacagcaactgttggagaagggagccctgggagccctgagtgccgcaggcttctgtggccctggcagctcggcccagagtcaatggactagggccagccaggggactttccgacaagggccagctggtggtattttaggtcttgggggccgtgccgtctctgttatgagcacgcagccctgacgtgcttgaaagcagccacagacggtggtgacaagcgtggacatgctccaggaagacttgatttggggaccctgacattggaatttgcatctttttttttttctgagatgttcaaacacaagtaaatgtgagattaagagggggatccctcctacccaagcttgggggtgggtccaggaccctggaaggcctccatttgccatggggaggctgtgaatctgagcctgagagccattctgaggggtgggtgatacctacctgcaggcccccccaccacgcctgcccaggcctggtcctgcgctgcagagccaaggacgggagatggggttagacttggggccctcacggaccagcctcagccaccgagcgctcaccccctgcacacaggcctggtgggtgggcaggctccaggctccagggcccctcccaactcttcctgtgggccccaggcccagggctgccatctatgacccaaaacctgcgagcgactctcctggcctgtggggatgtggtggggacgcccggggatgcgctcaggagttgcaaaacctcatgagcttgctgggagcggggctctgaggacagcccatcagtggctcctgtgagacccacatgaggcttccattcagagcagccctccgaatgccagggtcaggacttgaaacccttctagatgtttctgggcttgtccctgagaatccccaagactgctggcctccccggaggcaaggggcctggactcctgagcctctgcatgctggacaaagggccctacccagtgtggcctgatgaggggtccctgcaggaatcacaggtacagcccaccagcccagggcatgtgggaggcccaggcataaagactgggtgtcactgaaggtcggcaccacccactcccctaacaccccgcaggggatggggggcccagctgctgcccatggcagaggccaggcttggtggcctgaccccagtgagaaccccacgcacagagcagggccccactcacactggatctgctcgtgcaccaccagggcgaagtggtccatctccaggatgtgcgagagcctgcccagcgtgtccgtgaggcggatctgcaagggaagcgtggtcagtggcagggggaacatggccccacgagttttctgtggagtgagaggggatgcgatggtgggtcctgcaaagcccacccgggaggcagtggcagccgaacgtgggaaatacgtggattcgggtgacgtctcgggtgtgtgtgtgagatgggaaagaagtcgaattcactcctaggtttgggcagaaccctcagcctttccagtgtcaagagccacacctgcatgtcccaggggatccgtgtggaaggtcacacaaactttcctgggccaccctcagggcagcagagggtgggtgtctcaggacaaccacggagtctgaccagcccggcaaggagccaccgtgggcttctcccagaatgttctagctcttgttggataaccaagtgcatgcacaggcaaatgaggctgggcaggagaaagaccccggcagacgccgcatggtgcccgggacagcctctgagcgcgaatgacctccttaagtccccaaaacacggctggtgtggatgagcctgcactgatgagagcctgctctccggctgctgcacttgtaaagtgggtgcttctcagcttcatggtttgaggggtgcagccagcttcggcctaagtggtgttgagggtcgaggacccagcacccccacacgggaagcgcggtgtcccgccttcgaggctggagtactctggcaccctctggggtcccgaagtgcctgagtacctgtttgagccgcgtgtaggtgactgcgcacctgtttgaactgcgtgtaggtgaccgcgcacctgtttgagctgcctgtagctgaccgggcacctgtttgagctgcctgtaggtgaccgcgcacctgtttgagctgcctgtaggtgactgggcacccgtttgagctgcctgtaggtgaccgcgcacccgtttgagctgcctgtaggtgaccgggcacccgtttgagctgcctgtaggtgaccgggcacccgtttgagctgcctgtaggtgactgggcacccgtttgagctgcctgtaggtgaccgcgcacccgcttgagctgcctgtagctgaccgcgcacctgtttgagctgcctgtaggtgaccgggtacctgtttgagctgcctgtaggtgaccgctcacctgtttgagctgcctgtaggtgaccgcgcacctgtttgagctgcgtgtaggtgaccgggcacctgtttgagctgcctgtaggtgactgcgcatctgtttgagctgcctgtaggtgactgggtacctgtttgaactgcttgtagatgactttgccaacttggtctgacggctgcaccttcccggcaagcagggacgagagcatgttcccaagcgtcaccattcccaggattaccctgtgggacgggggcaggcaggggtcagcgctcatacctcacccctcccaggacggtggggcacacgctcagctgccccagggaggagcgctctctggccacacatggaagtcctctgccacgagcctacacgcggcaggaaccagtctgggccctggtggggagaaagaaaccaagagtccttggacccgttcagccagggtcaagggtgaccagccgtcaggtttccgcgacgtggggctctcagtggtcactgggcatgtgtgccaaggctttctgctgtcagacatgtcctcggggcatctctcccctgacctccaggtgggcccaggacagcctgcacacaaagggtgggtgggctgaggtctgagggcctggagtgagcacggcagccctgccccaggctgctcagggaccggcaaggggcctccaatgccctgaacgtctgtatgaggcggcccaggcgggcctatcagcccagctgcagggtctgcatggctgccctgtccagtgacactgacggggtggagctgggcagacagaacccaggactgagctctgagcaggggctgagactgaccccgcctcatccaccacgggcgcctggtcgaagcccttctcccggaggatctcgatggtgtgcccacaggtgatggtcgggagcacggtcagcggggctgacaggcccagctcctgaacacggaggtgccaccacctgagggaagagggcaggtcggggggatcaggataaggacaaacgctctcgcacccccgccggcagcacctcagcaggaggccacagggaccgctctcctgcctgtcacactgggcagggccagcacaggccacggggaccgctctcctgcctgtcacactgggcagggccagcacaggccacgggggagtgctctcctgcctgtcacactgggcagggccagcacaggcagcgggtctccggccgagcggtcttaccagggcttcttctccgtgaggtcctcctccttcagaaagcccttctgcagcatccacctgtcgctcaggaacttggtcctgcgggatgggggagtcaccgagtccccgcagggccccaccgggcccccgcccctgctgagtggcacgcactgcctgcccagcccctctcctggacctcactggtgcagcagagacccccaagtgctggctggaagccccagggggaagcctgggggctggacttcccgcccccatggccaacaagcgtgtgtgagcatgcacacagccatcgctcaggcactcagataaacacgtcctctcatgctcgctctctgcccctcacacactcacacgcacaggtacacatggcaggctggccaagtatgtggggagatggtgttcttgcactgacgggggtgggcaggagccctgcacagggcatcttgaccctgggcaccagatgtgaatcaccccacactggggaacccaactgggggcacccaccagccaggcctggccctccaagggcagctgagctctcgggagctgtgtagccgctgcagcttgcaggccatggaggaaaccctgcaggtgcaggggacagggcatgggggtctgtagacacccgccctggtaccgcctccggagaccaggtgcagagcagcgccagtctcagcctggctgcccggtgaccagcgaggtctgtggcgttactgtccgaggggcctctgggcaaaacagtcacagcaagtcctagggggccacctgggcagcactcggtcccaatctggagtttgggggaagcagcagagggagtcagggtggataggaggtggcacagggcccggcccaagaggacgtcagtccatgtggccagggctacccgttggagctcacggaccccagagcagtgagggggacagacaccagagaggaagggacaggagggacagagagggagccaccgtctttcatgcccctcctgtcagggctgtcactgcgagtgtgcattgattttcacagcattaagaggctgggaagccccacagcgtgagggcacgtgggcaggagagtggaggcggtgctcacagggccccgctggcctcctcccctcccagttctggctgccggttctcaggtgaggcgtgagaggcatccagggaagggtggcaggatggagaggagcagggacctgggagggaagccgtgtcttacatgtagttccgcactgagtcgggcagaatgaccacgcagcgctggccctcctgcagctcctgcgcggccttcacggccaccgccaccgtgctgccagcactgccacctgcagagagggccacgagtcagacgcgccagggtgagcgtgcgtgggtgcacacgtatgcatgaattgtgcacgtgcacgcatgggagcatgtcagacacactccgaaggatccgtcaagaggggttgcctcggggagaggggctgggaggaccccacttctccgtgagcatcggcttcttccttgtgcaccatggagtttctgtgtccactcggggcttcataatgagctggggtgggcactggtgccagggaaatgcctgcagtggggctgcggcccctggcaaacctcctggccctgagcctagagccagcgatgctacgaggacggagcccccagcaccacgcctgcaggctgcctgactgcacactgggctctgctttataaacaagagaccaaggctcacagtgacaccagctgtccctaggagccctgaagtcagagtcagaggcgtcttctctgggcttagtttgagggtgcacacagcagtcgggaaggtctaagtctgcagtaggagcccccacaggaagagaggcaccctcctctgtaacggggcccatggacctgctttccagccccaaaggcaggggcttgtttctccaccaacatggggagcagggagactgagacagggagagcccaacgattatgggcaccaagtcacctttcgtgacagattcatctggaaaatgcttttcttttcttttttttttttttgagatggagtttttgctcttatcacccaggctggagtgcaatggcgtgatctcggctcactgcaacctccacctcccaggttcaagcaattctcttgcctcagcctcccgagtagctgggattacaggcatgcaccattacatcggctacttttttttttttttttggtatttttagtagagacggggtttctccctgttggccaggctggtcttgaactcctgacctcaggtgatccacccgcctcgacctcccaaagtgctgggattataggcatgagccaacgcgcctggctgggaaatggtttttcaatcaagactttcttccaatctctagtttggggctcagctaacgggggacttggccatgctgagggctggtttccttccactttccctgtcaccacccccaaagtgacatgacacacggaatgcacatgtagaaacctcacatgtccctgcctgcgttttagaagctggtgtgtgctctccgagtccccagaggtctagatcaactgtggtccctacagggcctctgctgcctgtgtggctagtcagtggcattgccagcggccacctggtctgtccacccccaagcaggtgggcagaggggcacggggtaggaggaaggtgagcggggtcgagctggacagcctcaggctccagtcccctccccagctgctccagggtgctcgcagcacccagtcccggccatgggccccgtcaatgcagagccaccgccccaggggccctggtggacttgattagaaacaataagtgccatgagagcttcagccttgttctagaaacacattctggaaggcagctcgaagccccgccccatggcctcctgccctcacctgagcaggtgaccacactgggcaggcagacaacacctgaggctcgtggccgccgcagtgacactcctcagaactgctgtcttacacatgcaggtcggtggctgactgagggtgcgcccccagccatccccagtgccccctagccatctctgccttccccatacccccgtgcccgccacccactcaccgcacagcagcccctcttgcgcgatcagcatgcgggcaaaggtgaacgcctcctcatcgttgctcttgaaccacttgtccaccacctgagcaggaccccaccacagcccgtcagcgtgggagccgctcccacgtgaccaagagggtgaacagcctcatggtggaccccgtgtctaggcggtaggaccccagaggtctcaccccagcctctccccctgggatcggcacgtctgcagactttccagttccaacacgttttgcagacagcaaaactgcccgccagccccactgagcatccgtgtgacccacaccggcccttcggtctctgctctccctcaggccaaagtcagctttttggctcttaacagacttttccggggccttaattttcacacgttttccctgctccctgcctgtgccacctgggctacatcccttggtgaggtcaggccacgtgtgcggacatcgtcccccagtctactttgtctcgaccttcgagaccagcttctcaccatgcgtgcggggcttgcccttctgtttcagtggagaagctggttggggcccagggtcagccaggctccccagtgtgagggtgagttacaggctgcaccggcactgtggccgggctctggactcgacctaccgtcctgtccagcaccgtggggatgaagtcgtagccgatcccttccacctcgtaggttgtctgctccgtctggttcagctcctccggctctgcgaggatggacccttcgggatccaccccaatgatctgcagagggcgcggcttcagggctcaaggccagcaaaagccccgcctggacatgcctcgatattctattatgggagtggccaataccgccgttaacaactgcctgttaatgatctgcctgtgggtggtggcctgttcccagcctcagaggcaggatgagaaacccaagaacccaggctccaagtattaaagcggtaatgacctaaatgttcagtgcagggcgctcagaagtaaaggcaggtgcctgggaggaactgacctccccggggtgcttctcggagcggggcccccaggacagtccagacagaccaccctgcggcggagcagcagagcctttggggacaaagggcattgctgggcagtgacgtctttttcaagggcaagcaacagggagagaacgcccttgtctcatcagcgggacctttctaggcacccgtcctcagacctgctcttaaccccgagtccaggaaccctctcccaactcccacaagccccagttgaggggcagactcaggaccagaggacttagagctcctggctgatcctcagaggcccccagttggaactccgaccccccactcagcgcaggaaggttctccaagacactggccggtgagcgagcacccagccccagctccttcgggtcacgagctgctggtcccttatgtgtcaagcacccttgtcttcccaaacacctcccaggcagcgcagaaataccgcgggagacagcgtgctgagcagaccgtgaggaatgacagctttcagctcagaagccggggccactccgcactgcccctctccggcccggccacaccactcaccctgcatccaggacacttctccttcagcttcctggcaatgcccgtgatggtgccgcccgtgcccactgaagccaccagcatgtccagcttccctggtggacggataacattcttgggtccctgcctggccagcccatcactcatagtaataatcattgaaaacacactcagcccaaaccacggtgggtaaccaaaaagttcaaaagaaaaacttcttctccagttggagcagccctcgttgctgcccttggtctgtgaaagcctcagaaacaggcagcctggggcaccccagcccagtctttgctcagtgacactcgacccctaaaacccccatttggctggatgcagaaagacaggaccctgtccggggggtgcaggcgctgagggcgggcagagggaggctgtgaattaaccacctccgtgggctgttggatgtttgcgtggtgtgagtgagttaactgaatttacacaggaaatggaatcagtcttttaggcttcagcgcagaaactcgctgggcgctcacactgctggccgccagcgcgggcatctggtggagaagtcacagcagggaaagactcagcgagacggagcagcttgggcacccatgctgagacaggactgtttttgccaaatgagagagttctcacacataaagcccaaacaaccaaatgcctggaccttacagcccggctcctgggcacggactgagggtgtactccagcccatgccaacaccggattcccaataggaagccagggcgccaacctcttggcaacttatctctaaagggatctcttgggaaaacctcagtaccaacccccacaggccttggcaccgagtccctggaaaagggcccaaggagccggcctcatgcttgtaacagagagtgagctcatcgcagatgtcaccagctctgttctgcagatgaatttgatgccgagtcagggcatgatcccaaatgaagtccaagctgtgagcccagcaccagcctgggccctgaacagactcgctgtctgcattatctgcaggaggagcccctgcagacctgcagagattgctgggtaaacaaatacagccatgccctgtgtttgctattacaggtaaaccacaggcggaggccaagagggcacaacggagggaggaaattgttctagagaaatgctctagaaaagcatttcacagagggaacatttgagctgggttctgaagggtgaataggagttcaccaaggagagggcaagagatgtgtacactcccaggcagccagggataaatgcaatcaagatggacagagggacgcaccatcacactgctgcaggatctcatcagcggtggtgtcgtagtgagccagggggttgctggcgttgcggtactgcatagaaagagagcagagcccgtgagctgacccctgacacctcagtcacccccacatccctgaccgagaccctcctagggaatgcctgtctccaggccccaggtgcctcacctggtctaggatgtgagaattggggatttcgttcttcagccgccaggccacccccacgtgtgactccggggagtcgaacctggcattggtgggcgtcctcacaatctcagcccccagtgcccgcagcacgtccacctgcaggagggaaagcggtggcctgcaccttccgcctggcccaggcaccctcatcccctgccctatgaccccgcccctggccacgcccacccaccttctcggagctcatcttctctggcatcacgatgatgcagcgatagcccctcactgccgcagccagggccagcccgatccctgagggcacacagagggtgagaggggcccagtgaccccccaagccctgccccgcccctgcctgggacacaggggcacaccccgatgccggttcccttagggcccagggaagagggttctgtgggattccaaaattgcccaacatggctgcttctgccttcaagtgcagggggagagaggctgccagaggcagaaataaaaggtacacgtcaaggaggaggaggcagcggcgcaggacaggagatctggttcctccaggcccagccgggtacacaggcacaggaagagcagactccgggtgctcgtcttgtgtgccaggcactgccaggtgccatcgccccgagagcatcggcactggccccgaatgctggtcaaaggaagctaggttgggacacaggccggcagcgggtgcaagatgccagggagcaggcggccaggcgggccagcacatgcggctgcagctcagccatcccccccgggtcccggcaggctcggcatgggtaggggacagccagccctggccaccccctctgggcctggcacccaccggtgttcccggatgtcggctcgataatcgtgtccccgggcttcagcgtcccgtcgcgctcagcatcctcaatcatccgcaggctgatgcggtccttcacgctcccgcccgcgttgaagaactcacacttggccactgggaggcagagatgaatcacagaggggaccccctgaccacccccccattgattcctgctcacccccccattacctgatacaccccagggtgggggacgggcttgggggtctgtgggttctgaaaaattgccacctctccactcacctcccctacacctgcacctgggcactagcctatcagagcttctccccctgcagcccatcctaccggtcctgcagggcgctgagcaactctgtgggaaccagagaggcataagcagccctcactggggggcgccgcagaaaaccccgtccccccacccacgagctgggcttgtggcgggcaggcgcctggatttgggtcccctacgcccctatgcccagccatacccagcggcccctgccaaagcagcttgatgtcctgaagccacagcactggcttccccatcggatggggactcgcatactctccctacagcctcccattgtcctcctccccctgtggggcgtcacctgcccggggaagggctccctgcgcggttcccgcacaaggccaaggccttcacttgcacttccttccttactgcaagtcctctctccctctccagctcttaaaaatatttagtttttaagagcgagagactgggctgcatgaaatgtgatttgagggacctgggaccagcctgcagcacctcaaaatttctgaaagcaaccaccagacaggtgttgcccctagaaccaggacgaggcgctgtgtgtggtggggaggactctcggggtctggccctctacaggcctgcattctcggacccctctgggtcccatactgtgaaaccctcagttagatcattctcactagcgcctgggggccagctccgaagcagaaatcagagctggtggcctccggcaagccacgtgaccaacctgaccctcggtgtgtctgtctgtaaaacgggcattccaaaacctacttcaagggcaaccaccaagtttagacgtcatcctgtacggagcacagtgagccagccacgcgtgctgcgtacgagttaagggtccctattgtctgacaaatgagcacagagccggccctgctgccttgggggtctctgtgaagggggctgctctgctgcagctccgagatctccttccctagaggggggcagaggagggccaggctcccacgaggcccctcctgtgaatcggcgatcggttcccaacgcaccgacccctgacttccttcccccagcgcctgccccagctctcacaggtcccccggctgggacattagagcatctcaggatgaaaaagtcccaagccatgttactggttccctctccttcccactcgaactccaccccctccatctggccctgtcgcggggttctccgcggcacccttcctgcctccctccgaactcacttggccttggtcatctgaaatacgaaattccgtccccgccttgtccccaaggcctctgcacccacagctttctctgtgacgatgctgaggtctaccagggctctgcgctcttggtgaagagcgacccttaggaattccctccacgttcttgagcctggaaactgcgtcctgcaaagaaatgcccttccccggaggcctcagaccacacctcaggtgaccccctgcgcacccaggacgaggccagccacagaccctccaaattcccattctctgtctcataaatgatgagctgaactatctgtccccacgaagctggcaagacagaggtaaccgctccctggacagcgggtggctcacagcacgtgctaggacccgtccactgctccttagcaggcatgacgctaaccctccccacctgcttgcttctgcctttgaccctcacccggcccttcacaccctcgctgcttccactccggcctcagttcaaaggtcacctgttcgttccctggtccatctgctggggagtcactttggtcaccctctgacacaatgccctgttgtgtgtttttcccaaacttaagctgatatgttcttggccactcattaaccagcgagttttctgatcccagggccttgcctaagggatccatcccaggaccccccaggaccccccaggcccacggagcccagtgtagatggaggaagcccctctccaaagccagggcactcacagagctcacacttcaggccgaacttcttcccaatcttgttgattctgaccataggggtgtccccgattttcttcagaatatctggcaagatttttggagattttgccctgaaacagaggagtccacaattattcaggaaaaaaaaaaaaaatagtaccagccctggcagacattgtcttacacaaatcaacactcgaagaactggaaaaaaaaaaaaaaaaaaaaaaaaagaactggctttatctgggtggtggttacacaaatctgtacacagatacacctaacacacatcccacacacacgcctgaaacacacatacacacacatgcttagacatacaaatctataaaaagcaaatcatgcctgtggtttatttgcaccaatgccagcttcccaggtttgaaaatgaacctacagtcgtggcagatgttgttagtgggaagctgggagaagggtacaaaggatctattatttttgccacttattgtgagtagtaaattatttccaaataaaaaagttaaaataagcaaatactgactccaaaacaaaggtttaggtccaccttttcagaaaggctttactggagatgacatttcctttcatctctcagcatgtgaccataggaagcaaaaaagtgtcagggcagagactccttagaccagggacaatggctgcaaagcgcaggcgggatgtctagccctgcacagaaaatgtcaggcacgtggcagactcagagccccggcagaggcgctgtcggccaggctcgtgatgccctgccctgcagcatctggctgtgtaaaccctcaaaccctggtccaggtggtttcctaaatggccctcatgcccctgccatcctcccccagggagatgctgatgacaccccctatctatctgcaccaagctcaccacatactcatctgggaacacgcatggcttacagcggtctccagacccgcaacccctccctgggccttgcagctccgatgacaccccgtggctaaccctgggccccctcttcagcacagtcacctgctgaacagccagggtccttgggtcctgccccccaggaggcgacccttagacctggggtgaacccagctcccagaggtcctgtgccatggagggagtgccacatttgcagggagagctaccctgaaggccaaaacaggcgccaacaagagcagctggaatccaatcgcacccttcccggggagcagaaggcagtcctgccaggtccccaaactgtacaggggccagggaggttccctcagaagcagttctcggcagaagggaaccaggcttggcaggtgtagagagccagggccaggtggaaagccaagccccagggtgacagcgccggggattagttcattaattcagttcgggcatctggccagccaggcgggaagagtcccgcctccctgcagcaggtgtgctgactcagcactgggcctcggtggctgtgaagttacctgagaagtttgcagaggtgatcagggccaggcccagagcgcttagcaagaaaaaggatgtgacttgcagggatagccctggagccccttatctcaaggactcccacttccacagcccaagaggctcctgggaggacacgccactgtcctagaatgaacctccaactcctgacccacctctgcagcacctccccgcaacgccactattctcaggggccctccgactggagacaagcggcgtcggctctgcgtctcaggatgggggtgtcttcggaggatgaatgaggccagtatgtgaggtgcaggtgcaacgccatttacaacctggagggcatcgtctccttctcatgccctagagttaggagctcacggagccctcaggaatcgggcctgtcttccctgcccactccaccctccagcagccactcccgacctcaccgggcctctcacccactgctctcttgggtttgtcttggcagcaagagcccatcctcctggctgcccacacatctgcttggcctcctgagctcccagcactgagtatgtttgacactcagaccttctgggtttgtccactgtcacttctttctttctattgctgcactgagagtacacccagccacccccacccattctgaactgtaaatcaacaaccataaacgctggtagtggtggacacaaaataggaatcataatcccagcactttgggaggccgaggcgagtggatcaactgaggtcaggagttcaagaccagcctggacaacatggtgaaaccccatctctattaaaagcataaaaatccaccgggcgtgctggcacatgcctgtaatcccagctactagggaggctgaggtaggagaatcgcttcccgggaggcagaagttgcagtgagctgagatcgcgccactgcactccagcctgggtgacagcgagactctgtctcaaaaaaaaaaaaaaaaaaaaaggaatcaaacatctaagaagcacattctttgatctatttgttctcctccaagattacactaaggaaataaagataatcctaaggcttagtgagcttgatttcagtttcatgctggggtagggatttttgttgatttgtcttttccactgatagatcttctgcgccttgagcagggcacgaaatgcacatggcgctgaggaaagacttgttggctaaatgaatgtgtcgtatcttctattgcagttatgtaaaatgaggtaactgcaaacatctatctaccccgtagagggcttacaaaatgatggcttcttcaccgaacagtctgtgccaccagaaaaacagcccttatggaaaaatatgtaatgcctacgggaagtcttcatgacctagagttaacggaaaagtgcaggctgggccgggcgcggtggctcacacctgtaatcccaacacttgtgggaggccaaggcaggcggatcacttgaacctaggcattcaagaccagcctgggtgaaaccccatctcctaaaaatacaaaaatcagctgggtgtgatggtgggcacccatagtcccagctacttgggaggctgaggtgggaggatcccttaactgggggagattgaggctgcagtaagccatgattgcaccactgcactccagctcgtgtctcaaaaaaataaaaaataaataaataagagagcgcaggcaggatcctggtccctcacctccagtgaatgtgcacacgcagccacagaccgggcaaagcatgtgacctgggcacatttatttatttattctggaactacttgctgagcatccactgtcttgccaggcactggcctaggcgctgggctgcagcgtaaggaggccttggcctctcagagcctcatctacacggcatggccccacccccagctcctcaatccagagtgactacagggggttacacctcatgtcctcctggctgtgtggtgtccaggtaacaaactcctgccctccaggttatggatcagccctcttgtgatcaaaagcaggacttacggggcagtgtggtgatgtggggactcggaggcaggccggcccagctgccaggtgcacctgctcggagcatcgggccggatccacaggggctccttggcttccttatcctctggggaccccttctccaggctccccttcgccgagtgtggccctgagcggtgggggcagcctgtgggccccacttctgcctggggggtctcagaaggcatgctgggacctggcaaagcaaggagagaggcgtcggttcaggctcggatgctgtggggttccagcgaaccctgctgacccggccccctctgggaggcgtgctctgctccctcagagaagcccaggaagaactgcacaaaaacacaggcaccagccctgtgggcagccgcttggccatttctctcctataggcatataccaaaaaaaatggaagcagacagttgcttgggccgggtgcggtggctcacgcctctcatcccagcacttcgggaggctgaggcaggaggaccacttgagtccacgaggtcaagaccagcctgggctccagccccatctctatttaaaaaataaaacaacaacaacaaaacagatgcttgcacacccatgctcactgctgcactattcacaagtcaaaacgtggaggcagcccacgtatccgcagacggatgaacacacacagtaggctcatacacacactagaatattactcagccctaagagaaatgaattctggcacacgctacaacacggacgaaccttcaggacattatgccaagcgaaatgagccagacacaaaaggacaaatactgtgtgattccacttccacgatgaggcacctgggactctcgaacgcccctctatgtctggcaaattcatagagatagaaagtagaatagaagcggccagcggctgaggtgagtggggaagggagggtgattgtttaatgggtgcagaggttgtgctggggatgatgaaaacgttctgggtggagatagtcacggtggttgcctcacacttagaaatggttacagtgatcagtgttacgtgtattttacccaggattaaaaacacacacacgcacctgaaatagatgagacagaaaaaaaaaagaagaaagcaaaaagaaagccaggcgaggtcccatctgctgcccctcctctggggggacaaggaacccacgaccacctcccaccttgccttcttcagagggcccaggactgggctcagccccgcttcaccctcctttgattccccacattcaacaggaagactaagtccacagccgtcactcaccggacagatggtgctgacagttcagcaccgctcaaactctgtaaggagacgtgacaacagaatctgtcatgggatcctggaatagaaaagggcagtgaggagaaaactctgcaaatctgactcaagcgcggactttggttaatgtcaacaatggttatgtgatcgtggaattggctcattaattgtaacaaataggccgggcgcggtggctcacgcctgtaatcccagcactttgggaggccgaggcgggcggatcatgaggtcaagagatcgagaccatcctggccaacatggtgaaaccccgtttctactaaaactacaaaaattagccaagcatggtggcgcacacctgtagtcccagctactcgggaagctgaggcaggagaatcgcttgaacccgggagggggaggtcagtgagccgagatcgcgccactgcactccagcctggcaacagagcgagactccgtctcaaaaaataaaaataaaaataaaaataaaagaaaataaataaagtaacaaatatacgacatcagtttaagatcttaataacaggggaaactgggggaactctatctattttttcaatttttctaaatctaaaactgctcttttttaaattttcgagacggagtctccctcttgttgcccaggctggagcagtggtgcgatctcggctcactgcaacctccacctcccgggttcaagcagttctcctgtctcagcctcctgagtaggattacagacgcccgccaccacatccggctaatttttgtatttttagtagagacgaagtttcaccatgttggccaggctggtctcgaactcctgacctcaggtgattcgcccgcctagcctctcaaagtgctgggattataggagtgagccaccccgcccggcctaaaactgctttttttttaaaaagcctattaaaaaagaaaaagttgcggaagccggctgcctttggaagcccttggagtatgctgttcaggtggtctctgcgcacaggccctacccaggcctcagcttggcctcctggacttcccagcctcccctccacctttgcaattcaccagactgggggccaaagcggcttcaaacgaccctggagggtggtgctttcaaggtcttgggaccacggacttgtctgaaaatccgaaggcgttggatcttctcttccccagaaaaatgcacccgctttcagaggttcgtgtcccacgcttttctttctatcccaaccttgtaagaagccgccgccgtgagcggagcagcaccttcctccgcgggtcgcgggagtcacctacgggaagggactctccgtctggcacaggccctgtctggcctggggcgcgcatgctccgccgccgaatcttccagaaagccgtggacccgaggccccggcagacgcaggcggcccagcgccttgcttttggcccctcgcctcgccctggagccctctctcgcaaggtaagggactgccgggaacgcagatcgcaagccgtcggggctctgtagaactcagaggcgctcggcggaaagctcgccaggcgacccagacccgaacccgcgggctccccaagacaacagcgccgggcggccggatgcacgtgcgtcccgggaaggcgggttcagctggcatcgcctggccggttccgttcgctccttaaaccacaagacccccttggggtcacgacgttcccggggcacccctgcactcgcgcgccagcactcccggaggggcctggggaaggccacgcgcacggagagcgggaaactcctctaggtttccaggtgggagatccagaccctactgagacccggaaaccgccggccactccgcctccggaagcgacactttgggacaaagctggggacaagtaagcccagaagatcctcgggaagccgagaatttcgcgctccgctctcccacccacgctccgcctcccgcttgcatcctacagctcagctgcggtctcgcctggggctcagggaagtgaggtcccaggaaaacctccatcccccgaacgcaacctgggcagagccccgcgtccctcccccagcgggcacccacctcgcgtgccgcccgcgcaacgacagcgtttaccgccaccccacacggtccgccaaaaagggcgatttgcaaacagccatttcccatccacaatgcagcgaactcaatgctgggcaccgaaacgtgcatctcccccggattcccaccccgcgtccctgctccacgctccaggactcgccgccagtggggtccactccgccggcgcgggggctggggtgggagcccggggccacgtgcacggccagcccccatcttctgggcggtcaagaccgcaggcgtgggcgccggtggggcgggggtcttgggagaccctgtctcgccgcctttcggtgcagatgatgcaactctgggcggaggcgcggagagggaaaccgggacccagttgagatcctctgtccagagaggggagcgagtctcggtggggccggatctcacctggacggatacatggaaaagaggggcgagcggctgccccgactgcggcgaggcggagacggcgaccccggggtggcggcctcgcggggacccacggcgaggggagcaggcgggcggtgattggcggagaggcgggggcggaggccggcgccggccaatgtctcgtggcagagcacccgcccccccagcccctcctccaccccacccagcccgggcccctcccccccaccccttccccaccccgccgcagcctgggaccctccggcctgcccgacccccgccctccccgggaccccggcatgcccccaccccagtccgcccgccccattcccacgccctgttgattcaaccgcagacccgggtcgccgccccctcccccgccttcctcttcgcctgagcccgcccgccccgggttccagccacccccacccgcggaccccggtggtgtcttctacctggtgttccgatgctgttttacttggttaacttcttgcccttcgggaatttaaggaacctttactgatgagcttgaaacgtgcgtcctggtgggtggggggccctgcgcgtcctcgaggaccgaccccgagggcgtgtgtcgcgggcccgggagggggcgccgcgccggggcgggactcgatggccgcgctctgtggccgccggacgccgtgcgcagcgccccgcgtgaccgcgcccagagccgggtccgaaccccgagccgaggcgcagaacagtcgccttgcgcggctccggtgcggcccacggccaggggctgccgggcgctctcggggacggggccgactccgcgcagggtggtagcaggggcgccccgcggggctccttcgccaggtcccggaggccgcgggcggggccgtttcccaaacatcgtgctctggactttcagaggctgaacctgatccccccgccctatggctaaatgggggatcccaggcccccgagtctccccccggacctgcagcgaaagacacggacggtgcccatcagctctgggcagaggaacgtgctgcgcctccgcagcgtccccggctcaggtcagagcgatgctccgcagcctcctccggcccgcgcagctccgccgcggtctctgccacgtggggctcacagtaggggagggagtgagacgtgaattagaattaaatgtccactggcaggaactgacacgaagaacaataaagccggcgatgtggggaggggacagggatggagttacatcatgaaggctctggaaggtggcattggaggccgggatcgcgccactgtcctccagcctgtgcgactgagcgagactgtctccagaaaaaaaaaaaaaaaaaaaaaaaaaaaaaaaaatcctgtccagtctttataagaagagagacgtggacacagacacgcggagagaaaaaggccatgtggagatggcggcagagatgagatgtgctgccaccagacgagaaatggcagggatggctggcggcctccacagggctgggaaaggtggccagggcctccctcagagccttcagccagcctgcgggagagaaagatgataaacggtgttgtttttgttgttgttgtttgagacagagtctgtgtcacacaggctggagtgcaatggtgagatcttggctcactgcagcctcagcctcccgggttcaagcgattctcctgcctcagccacccgagtagctgggattacaggcacgcaccaccatgccaggctaatttttgtatttttagtagagacggggtttcatcatgttgaccaagctggtctcgaacccctaacatcaggtgatccatccgcctcggcctcccaaaagtgctaggctcacaggagtgagccaccgcgcccagcccaatgtgtgttgttttaaaccactcaagtttgcagtaatttgttacacagcccaaatactttttaattttttagaaattttaacgtaattttagattagaaaagtggcaagaaccatacagaatgtcatattccctcatccagattttccaaatattaattttttttgcttctattatcagaaactcattgttatttcaaatgttaagtttttactacatttgctccctctctgtctctccacacacacacacacacacacacacacacacacacgtgtgcaggtgtgtatgaatctgtcactcagtctatctggtttctctaacttgttattttgttttgttttgtttctttttgagacagaatctttctctgtcacccacgctggagtgcagtggtgtgatttcagctcactgcaacctcccccccacgctggagtgcagtggtgtgatttcggctcactgcaacctccctctcccgggttcaagcgattcttctgcctcagcctcccaagtagctgggattacgggtgcctgccaccacacctggctattttttgtatttttttttaagtagagacggggtttcaccatgttggacaggctggtctcgaactcgtggcctcaggtgatccacctgcctcggcctcccaaagtgctgggattacaggggtaagccactgcagccagcccactctctagttttaacacttactgatgattttgtctgaattgatttttattaaaatggttgctgagctgtggctcacacctgtaatcccagcactttgggaggctgaggcgggcgcatcacgaggtcaagagattgagaccatcctggccaacatggtgaaacctcgcctctactaaaaatacaaaaattagctgggcatggtggtgcgtgcctgtaatcccagctactcgggagactgaggcaggagaatcacttgaaccaaggactcggaggttgcagtgagctgagattgtgtcattgcactccagcctggcgacagagcaagactccgtctcaaaaaaaaaaaaaagtaaataaataagtaaaataaaataaaataaaatggttgctgaatagtggtttttctaagcccatcactcctccatgtaccatttggcattccattattagagttttccttctccctcatttatttattcacttagttatatcaatgtgagccgtaggtcctattttaaaatgaaaaagctacacctgaccactgaaagtgcacgaatggccaagtggggtggctcacacctgtaatcccagcactttgggaggccaaggtgggaggatcacctgaggtccggagtttgagatcagcctggtcaacatagcaaaaccccgtctctagtctctactaaaaatacaaaaactggccagcgcaatggctcacgcctgtaatcccagcactttgggaggccaaggcgggtggatcgcctgaggtcaggagttcgagaccaccctagccaacatggtgaaaccccgtctctactaaaaatacaaaaaaaaaagaaagaaagaaagaaagaaagaaaaaatacagctggttgtggtggcaggcacctgtaatcccagctactcgggaggctggagcaggagaatcgcctgaacttgggaggtggaggttgcagtgagctgagatcgcgccactacactccagcctgggcaacaagagcgaaactccatctcaaaaaaaaaaaaaaagaaaaaaagaaaaaagaaaaacacatctccccggccctcatcattttctagcctctgcctcatttctgtgtctgcctacatgagaggaggcactgcaggagcagagcccccaggagggcctggcccaccacattgtactgggaaggagctcagagccagagatgcaggaatgctggcgtcctgtggacaaggtggaagagcttccttctaatcacctctgtttcttcaaaggaataggcctgacagctggtcagcagcaagtggacagcgaggccgagctgatggagggttttgttgttgttacttttgttcagagtataacacgtatgcagaaagtgcacatgtcatgagtggacagaggataaaccgctaccccactggggggcgagcagaggggagaggcctgggcctgcaccatcccctggtggccggaaggctgggccctcagaactggaggagattggaggaggaggaggaggaagaggaagggaaggaggaggaagaggaagggaaggaggaggaagaggaagggaaggaggagaggtgggcagcactgagggctcctgcgaatttccattcacaagtttcccaggcccctggcagcacggctgtgcttttctctggctgcggtgagtggcccgcgtggcagggcaggggaagagcgctggagatggtcgtgtgtgtttacgagattctctctccctgcccaagtcacggcagtggcggaaacttacccaccctttggatttgggctgagccgtggtttgcttcaccccttgggacacacagcagaagggagtgtgcctgtttgcagctgagacctcagggacagcggccctgacctcaacctgcagcccggggcccagccctgcagagcccggcaggggaagaacaaaatgccctttgctgggagccaccgggactggggctgtttgcaggctgggttacgtgtgagagtgaagttttgtctgagtgtgttggtgggagacggcacagacgggaggctgagctgcgtttgtttgcagggatctgcgctgggtggggcgggaaggatgggcagcaggcggcagggacagtgaaaagctggtgggtccatggacaggcagcgtcactggagagaaagaactgccgatggagagttctagaataaggagctggagcatccgaggggctgaagggctggcactatagcaacaatgccctttgggtatgagaggaggggaggatttgtgtaggtcggtggccaagatcgttctgaggggagggttcctgagcccaggcgtccaggaggagcttggatctttaatttctttcagtggtgttttgggatttggggtatgtaagtctcacacttctttggttacatttattccttttgacttgaggggcgagtctgctggcccaggaatgcaggcggtccgtgtctcaggttggctgcacgtcttccagcaacgctgtgtcattttccgagagtaacgtgtgcactcactcactttcacgccatctctccactctgcatttgggcaagcagagttcctgctccccgttctgcgtgtctgccccacccccacacccccacatcccaccttcagttactaatactgtatcttttctttttctttttctttcttttttttttttttttgagatggagtctcaccctatcacccaggccagagtgctgtggtgtgatattggctcactgcaacctccgcctcccgggttcaagcgattctcctgcttcagcctcccgagtagttgggattacaagcatgcgccaccacgcccagctaattttgtattttttaatggagacagggtttctccatgttggtcaggcttgtctcgaattcccaacctcaggtgatccacccgcctcagcctcccaaagtgctgggattataggcgtgagccaccgcacccagcctgtatctttcatttttctagagacagggtctcgctctgtctcccaggctggagtgcagtggtgcattcatggcgccctgcaggcttgacctcctgggctcaagtgattctcctgcctcagcctcccaagtagctgggagcacaggtgtgagccaccacacccggctacagttactaatgctattgctaccgacaacggcaacaactgactgccatgcactgattgcggatgtgccaggccctgctctgggagcttcacctgtgttacctgacaggatcttcctaacactgaaggaggggcacgacctgaccatccctttacagaagagaaagacgagtgtgcaggaacagggagcagagctgggtgagaccaggcggcgggactcctgggcccactcttacccatgggactttgtggtcctcccacgacgccaatcagccccagtttgaaccacgtgaaattgctgaaatgtgaccttttgacccacaaaaaaatggcaatttcctatgattcaactttttttttttttttttgagacggagtctcactctgtcgcccaggctggagtgcagtggtgcaatcttggctcactgcaacctccgtctcccgggttcaagctattctcctgcctcagcctcctaagtagctgggattacaggtgcgttccaccgtgcctggctaatttttgtatttttagtagagatggggtttcaccatgttggccaggctggtctttttttttttggagatggagtcttgctctgttactcaggctggagtgcaggggcgtgatctcagctcactgcaagctccgcctcccgggttcacgccattctcctgcctcagcctcctgagtagctgggactacaggcgcctgccaccacgcccggctaattttttgtatttttagtagagacggggtttcaccgtgttagccaggctggtcttgaactcctgacctcaggtgatccacccacctcggcctcccaaagtgctaggattataggtgtgagccatcgcacccggctgattcaacttatttttatttatttattttttgagacggaatctcgctctgtcacccaggctggagtgcagtggtgcaatctcggctcactgcaaccttcatcccccaggttcaagcgattctcctgcctcagcctccctgggattacaggcacccaccacacctggctaattgttgtgtttttcgtagagacagcgttttgccatgttggccaggctggtgacaaactcctgacctcaggtgatctgcccacctcagcctcccaaagtgctgggattacaggcgtgagccaccgtgcccctggctgattcaacttatttttaaaaaaagacctgggatttgaggaggtgcctgaatagttggaggtaggcgttttccaaatcgagtttggctgcgtggggtggaatgtaggctccaaggatgccccgctgtgtgaacaggccagctgctcctggaatgctgctgagagggaggtgccctgttgagggggagtcccaggggggtgaggggctggcttccttgctgagagccacaccatgccatctaacaagtcagctggaacccctggcaagatggccgaggctgggtggtgacctcacttgctgggttgctgggcccaggcccggctctctcctgaaagctccacagacctgcagactcagtttccaggcctgtcctgctgcccccggagcacgggcatgggaagacagccatctgggcggtctcgggactgtttggttgagaaggttctgtcacatatgacgtgctagaaagaaaagaccttggactttaatttctttgggcgttagagaggagaaggcgatttcagctttagaccatgttttctcttaggagcctggcggtgggaggggagcccggccatgggaggggagtcatattttccagactgtgcggcttcaggccaccatgggtctcagctgatctcttacaaagcgcttgggagctcccgagaccggggaggcggcgcggcgtgtcagccttggctgccgggtggcgcttgagttaacctgattattgcatggatctcactggttcaaaaccttcctggggaagaagccaactgtccgtggaaccaggaggagcctgaggggtggcagtgggcactaaggaagtggcctcggggtgcgggaggacagccttggcatggttgatgccttgcccagcccactctgggtgagggaacacgggaacagtgtcatgtttccatgaggggccactcctggcttctctcctcacccccccaccccccatccttccctggagaggagtgtgacctgtctgaccgcgtcatgccgaggcttcggcactgacttgtgcagatgcctgcactgcagggcgctgatctgtttaaatggcgcgagccctggggactcactccctccctacccccaagcaggcacagggccagcgtccctgcatgctgtgtgggcccaagctgacccgcaggtgggcagtcccgggtcagaccatggacagggatggccttacaagttctctgggccttaaaatctagattcatgttctccaatctgctttgtcagaaataaagttgataaggcaaaaaaagtctactcaggtgaaaaccctcagaggcatccttgaattctctctcacagcccacactggacgcaacagcaaatcccataggctctttttttcttgagtcaggtcttgctccgttgcccaggctggagtgcagtggtgcagtcctggctcactgcagcctcaaccttctgggctcaagtgaccctcccacctcgggctcccgagcagctaggaccacaggcatgtgccactgtacctggctggtttttaaatactttttgtagagatagggtttcaccatgttgcccaggctgctcttgaactcctgggctgatccacttccctaggcctcccaaagtgctgggattgcaggcatgagccactgtgcccggcccctgtagactcctgttcattcaaaatataccccaggcacaaggacgtgcaaaagacccacgagcagaagggaatccaagaacagacccatctgcacacggtgacgggactaccacagagggagccgcgtcctgcagggaaaggtggtggttgtttttacaataaatgctgctggagcaattggatatccatgtaggaaagcgctgatttcacaccgacacggaacatggctgcatgcgtggctcacgcctgtaatcccagcactctgggaggccaaggccggtggatcacttgaagccaggagtttgagaccagcctggcaacatgtgaaaccctgtttatattaaaaaaaaaaaaaattagatgggcatggtggcttgcacctatattctcagctacatgggaggctgaggtgggagaatcacttgagcccaggagtttgaggctatagtgagctataattatgccactgcactccagcctgggtgacaaagtgagaccctgtctcaacaatgacaacaacaaaaggaagacaaatcctagagctaaatgtgaaagtgaacatattaaagcttatgacgggggctgggcacagtggcttacacctgtaatcccagcactttgggaggccaacgtgggagggtggcttgagcccaagagtttgagacaagcctgagcaatatggtgaatccctgtttctacaaaaaaaaaaaaaaaaaaaaaatcaaaaaattagccagtcgtggtggtgcacacctgtagttccagctacttggaaggctgaggtgggcggatcgcttgagtccaggagatggagcctgcagtgagctgagatcacacccactgcactccagcctgggcgacacagccagaccttgtctcaaaaacaagctaacaggctgggcgcagtggctcatgcctgtaatctcagcactttggtgggctgaggcagacagatcacttgaggtcaggagttcgagcaactcaggaggctgaggcaggagaatcgcttgaactcaggaggcagaggttgcagtgagctgagatcacaccactgtactccagcctgggcgacagagtgataatccttctcaaaaaaaaacaaaacacgcacacgcacacacacacacacacaagcggccaggcaccatagctcatacctgtaatcccagcactctgggaggccaaggcgggtggatcacctgaggtcaggagttcaagaccagcctggccaatatggtgaaactctgtctctactaaaaatacaaaaattagccagacgtggtggtatgtgcctgtaatctcagatacttgggaggctgagacaggagaattgcttgaacctgggaggcggaggttgcagtgagccaagatcgcaccattgcactccagcctgggcaacaagaatgaaactccatctcaaaaacagaacaaaacaaaacaaaacaaaaagcaaacaggctggggatgggggctcacgcctataatcccagcactttgggaggttgaggcaggtggatcgcttgaggtcagcagtttgagaccagcctggccaacatggtgaaaccccatctctactaaaaatacaaaaattacccgggtgtggtggcgggcgcctgtggtacttgggaggctgaggcaggggaattgcctgaacccaggaggtggaggttgtagtgagctgagattgtgccactgcactccagcctgggcgacagagtgagtcttcatctcaaaaaaaaccaaccaaacaaacaaacacacacacacaatatatatatatataaggcttacaacaaagacagagaatatcagcaggaacttagggaggcgagaagtatcttacatggaacacaaaaagcaccgtgtacagacgaaagatgggtaaatcaacttagttgaattctaagaacaggctttcatcaagacaccatttagagagagaaaaggcaaaccacagactgggagaaaatatttgcaacgcacgtcaacaaaagattcatctccaccgtatataaaaaacatctagaaataaataagaaaatgacaaactactcaatttttttatttttatttttttttgagacagagtttcacttttgtcacccaggctggagtgcaatgggcgtgatctcggctcactgcaacctctgcctcccaggttcaagtgattctcctgtttcagcctcctgagtagctgggattacaggtgcctgacaaccaggcccggttaatttttgtatttttagtaaagacggggtttcaccacgttggtcaggctggtctcgaactcctgacctcaggtgatccacccacctcggcctcccaaagtgctgggattacaggcgtgagccactgtgcccagcctcgatattttaaaataggcaaaagacttaaacccggcttcacagagagacatgcaaatgttaacagcaggaaaaagtgccggcctcattagtcatcagaaatacgaaaatgaaaaccacagtcacccatcactgcaccccaccagaacggcttacaaaccaagcggagaggaccaccccaagcccatcacagtccaagccgccctctgctcttgcctggacagtcctgtctgtgtgcttctcctctgcactcctgcccggcctgcagtctgtcccccacactgcagtgagaaactgctttaagcatataaattagagctctttatgctcctgttcaaacccttcccacgactcagcttagggattccagggacaagccacgtgtggtcactcagacctgtactcccagcactttgggaggccgaggcgggaggatggcttcagcccaggagtttgaagccagcttgggcaacatgatgagaccctgtttctagggaaaaaaaatattccaggtccttcccatggcccatgaggccctgtgagagctctccctggcgtcctccccaaccttttcctgatctcttcccagcacacgtcttcaacacctggggaaggatgcccagggtccctccctctggggccccccagtactcagtcctgagtgactgtgggcctggtttcacccagtggcatgtgcagcttgcaggtcattctggtcaggggccagagcgccagcaagaagtctctctctctctcatcacccctctctctccctccctccctgtaagctggcagcattttgggtgggggctgccctgtcagcctggcccccgtgaagacagctctgagctgcaggaccgatggcaggcatgtaggtgagcgggacatgagtcctgggatttcagggctgttgtgacctggtgctagtccttcctgacaaccccagtgtgttcctggttcctgccgcaggaaatctgccctcactgctccacgcgccaggacgtgcactcctcctcctctttccgcacctgtctcccggctgcggctgctcacttgtacctgcaccattacttactgctgtattctttgctttttccagactgatgcacccaccagctgcaaatcttaggccagctacacccaacacagttgaatattgtggacaagctgtgccagacaaaatcatacatgatttcacttctaaaagcaggcaaaactgtcatgtttagtgaaccatatgtagtttgtaaaatagtaaaagcaaaacaaaatgattattgcaaatgtcaagatagttgtttcttttagggggaggaagaattttatggccggggagggctggcctggatgctggctttgtgttgcttcttgaccacgatgatcaccttgcaattgtcttttaaaccaggtttagctttgaggtactttgctgtatgtatcatacatctaattaaaaatataacagacatgggagccagctaagagatgcaacataagcgtaactgggggaaccataagaaacaatgttggctgggcacagcggctcacgcctgcaatcctagcactttgggaggctgaggtgggtgggtcacctgaggtcaggagttcgagaccagcctggccaacatggcgaaaaatacaaaaatgagtcgggtgtggtggtgtgtactcgtggtcccagctattcaggaggctgaggcgcaagaatcacttgaactggagaggcagaggttatagtgagctgagatcgtgccactgcactccagcctgggtgacaaagtgagactctgtctcaaaaaataaaagaaacaacgtaagaaaacttagaacagatgaagtatttgatagcattcatccttgacttcctggattgaatcacacccactactggcagatttaccttaacacgctgctggactgtttgctaatattggatgtgggggttttgcatccatattcagaactgggaggcccctgtagttctgtgggccattttgatcagtatcacactcagttcatagaatttggaagctgacctttttttcaggttggaaaaataagtgatgccaacttgggcctatgagatcgagatgctgggtgtctgtcatggcctgcatcggccatctcgctattcgcctaatgttatgtggaacccacatggcacagaccagagctcagcagggcaaggccactggacctaattacagaagccaacacctttttttttttttttttgagacggagtctcactttatcagccaggctggagtgcagtggcacaatcttggctcactgtaacctctgcctcctgggttcaagcgattctcctgcctcagcctcccgagtagctgagactacaggcatgtgccaccacactcggctaatttttttttgtatttttagtagagacagtgtttcatcatgttggccaggatggtctcaatctcctgacctcgtgatccgcccgccttggcctcccaaaatgctgcaattacaggcgtgagccaccacgcccggcccaacacatcttctcgttgttggagctagtttgttagattgtctgtcacctgcagcgaacagcacactgggacagcctggtccacttagggtctctgaagcggttccctcttctgcagagcgagacgctcctatttctcaagagcttgtgtgggtcaactgggataaagagctaaagaggtcccttttcttcctgctttgtcccatgtcaaccacaactccccttgctggtgtctggattttcagggcaggtaaaatttaccttccatgcccccacaacctggttcagctttgctatttccaaagcccttgagattctaaccccgccatccccctggacctctcacttctcaggctgctcatctggaccgaagggagctctgggaacagagcggtggttcctaggaagtgctgcttcgatttgagccccgcttctccagggcagaggcacagcattcgccaggcaggcactgtgtcttgctcaccccgtggtgtgcatgcatgtcccagcgtcctggcggtgctggccactgggtggctgcgaacccctggagcctgggaaacatgaaataacaagccactgcagggagcgtcataacacggaacacgctcgacggctgtcctctcctgggtcccctgcgttaggcatgcaaacttgggtgcgcagggtaaagcatgtgggctttattactgcattccctactgtcatgtatgtttagatatttccaaaatagaacttttatttcatgaaatgatggtgaaacttgaaagcaagctaaaaagtcccacttggcaaattaaaagttagaaatcttatgttgatcccgtctttggtaaaatttaggtggaatgtgaaattcacggtctgggaataaagtgctttttagggccatccatagccacgtcccgcatggcttgttagtgttctgagactcaaagtcttaccttccatcgcacaggatcgagaatcagattttataattctattcttcctctgtgctttgaattgagactttttccagaaatcattcttaggtttattcccttttggtaaattctagttcaatcctgaactagaaaagaggcagtgaccaccatcacccctttagacactgccgtgggcacaccaccaataccttccccatactcagttcatttgaaggcaacagattttctccaattagcagggcaatgaccccattaatcatggtttcagaaatatttaaaatgatccttatctacttacaagcacatgcatatggtaagcttgttagtcctcctgactcaacagcaagcaaaagaatgctgcagggaggccaggcatggtggctcacacctgtaatccccgaactttgggaggccgaggcaggtggattgcctgagctcagcagttcgagaccagcctgggcaacgtggtgaaatcccacctctactaaaatacaaaaaattagccgggcctggcggcgtgtgcctgtaatcccagctactcaggaggttgaggcatataatcgcttgaacctgggaggcggaagttgcagtgagccgagattgtgccactgcactccagcctaggcgacagagcaagactccgtctcttaaaaaaaaattgctgcagggagcacacagtaacttagataattcaacaccactgttgaatcagatgtgctgataccgtatttaaagtttattctggcagctgtttgccatttggttttatatctcagcaaacgtcatataatattcacgtaagaaacaatttacagtggtatttggacctgaattcattataaatcaaaattatttcaagtggcttttatattcttcctttttaaaaacaatctgcctggccctagcacctgtataaaagcttaactctatctgccactggtggaccgcctggactcatttcactgggctgctctttctcaaccatgatccacgcacaccagaggggcagcagtgcctcatgggcactcagggtcatgctcaccttcccacctcaaccgcatcatagacccacactggggtgggggagtggggagcagggtgacaggcttcctgtgtgactgtgagctcctcttactacaatgtctgaagacactttttatggcattttgattcacattttatcatttactggttttttttttgggacagggtctcactctgttgcccaggctggagtacagtggcaatcacacctcactgcagcctcggcttaccaggcttgggtgggtcctcccatctcagcctcccgagtagctgagaccacaggcatgtgccaccacacccagctaatttttttattttttgttgagatgggggtctatgtttgctgctcaggcaggtcttgaactcctagactcaagtgatcctcctgcctcagcctctcaaagtcatgtatattttaaataagctttctgattcttagcggttaagaaatataaagtacaacttttgccatcttccctccttcagactgagtggaaattaataaatggccatcactgaccaaagttaaggtaaaagaaaaaaaaagtttgtactttttttggaaacatgtcgagtataaggacataaacgaaacggcccacatcgccaaacactgccactaacccatctaaaattaccatttgcccaccacccacatcaccaaacactgccactaacccatctaaaattaccatttgcccaccacccacatcaccaaacactgccactaacccatctaaaatttctgcccaccacccacatcgccaaacactgccaccaacccatctaaaattatctgcccactactatagtatacaaacctatttttttctaagagacaaggtctcactgtgttgcccaggctggagtgcagtggcatgatcatagctcacttcagcctcccaggtgaatcgacaccatcaccttcttgaacttcatcacatacaaatgggctttcatgagatggtcaagtagtatgtcctgccaatcttcactgggtgtgtagttagggcccagccactcccctactccaccagcaggatctgtcactgagcccccacaaggagcagagcagggcaggagagcctgggtgactcccacctagagccaggaggtttttgaggatgaggtatgtggacacgtgggcatggtttgggatggcctcacttggaacgttttggtcttaggaatgaaatgctcagcccccagcactgacttgtggcaggtgccccagaccggtcagctggctgtcaccatagtcacaccaccagcacgcgccacccgagtagcttggggaaagtaataccagagtgtctaaaggcggatctgcaccgcaggcttctgtgtctcccacagccattggcataaggaaacacggacacggactactggccctcagtgtgccgtgtgagcatccacgctccctcccacgaacacatggggttcttgacacaaactcgcaggaacgagaaggtaacatgggtcgggcccacccactgtgtctcaccacagatcagccttcttcccaacatcagtgcagtctacagcgtgtctactgattatagctaagcacttcttcactaaccagttagaaaagaaaccccaaaaggctttccatgacagcctcgagaaattccggattatttagcatgtagatctcacctggtatgtgttttatttcatgccctaagataaaaaatattatttcatttatactcaaagtggtggatggatattaatctttacctccaagatgactagcagatttataaagaaaaagaaatttaaagaacttccacaagaaataagttacaccaagaatactgttatcactacaaattttattcagaaacccatctttgtatgtttttttttttgttgttttttaaaaaaaattccccttatgaactggtttggtcaatcaactacaacactttctagcagacataaggtaaaaatggcatggctcagaatcgcccagatctttcacgatctctcgaccgcctcctgtcacgctcccgtccgccgccacctccaccaccgccaccgccaccgccacgaccacggtctctagaccgagaacgacgctcccgggatcgggatcttgatctatgcctgcaaccaaggaaaataaagaaaaccgtgccatccaaaccacggcacgcagcacagaaccacacccactctctcaacacgcgcagctcctcaagccaacggcactgataaggaaaaacactgctgaagagactgcacgccgtgactgagacacaccctgatttcaggtgtgaaaagtttcaggagaaaaaaatgtgcaacttagaagtgaacaggtgtaataccttgcatcttctgtcttcttctagaaccaactcaaatggtcacaggaaatcataatcaaaatgagctggacacataccatcttcaaccctcactgaccccacgcttcaggcgctcatagctactgtgtccatcaggtttttgggctggggagagcaggcctgtttttctcttatgcttcttgaatgctgacaataaaacaatcgccacccatctatttactagtccatgtttaacagaagagggatgagaacctctccagactcagaactcaatcggttcgattctgacgtcttgattttctctgctctgtgacctgtcgtacatttaaatgtaggatcagagagatgtgaccgctgggcctgattctgccagtgtcccgaagggaggatgccagcgatcccaagacataatgaaatgccctaaaaccaacaagcaaaaccaaaagaaaccccagtggacatgtgaaatatgtaaagcaaaagcttgtccaacctgcagcccaacacaaattcatcaacttgcttaaaacattatgagattttttttgcaattaaaaaaaaagttatcagctatcattagtgtattttatttgtgacccaagacaattcttcttccaatgtgtcccagggaagccatccctgatctaaaggaggttacaacatctattcttcttcttcgtaatatctgggagaataaactgcatgcccactttcaccacgagcctcatgtccgcggctgcccagctaaccgccctcttgcttgattactaagatctgatctctacttgagaagttggataatgaagttacctgtgtgcaggtgaatattcttctccaaagaggacatttggatatttaaaaatatgtactatgttctaagcactgccttttaaaaaacagaaacgacacctatgccaaaattttttttttggaagggggagggttgtgaggggagaaagaagccactgagcttaacaacgggcacaggaatactcacttcttgcgacggcggccatacagctcccgccgcagctctctggaaatgggcttcaaatgcatgaagttgcagaagccgcctcgtgtgcattctctgtgggtgggttggaaggagacatttactacctcgtgtgcacacggccccgaactgtgctcagtcacgtcactggccactcctcactcaccccatctcatactgacggcagcaggcttctctgaagtccgtcacgggtgacagctcggcgtggatcggctgtccattaaaccaacggttattcaagtcaatcacagccttttccgcatcttcctcacggcgaaactgaaaagacaaaaacagaagtgcttgccatccacgctttaataagactttctcaattaccaatccaagtatatcagagagagatatacacactcaggtatagtaaggtggaatagtattacaggataattgaaaaatcctttattttcaatgagattaacttcaagatagtccaagattttgccaaatgttgccttcatttttcaaattcaactggttaaaggagcaaatatggctgtgtaggcaaataaagttttattcactaaaaaagaaaaaagaaaccaaacatgtgagtaaacctaacttttccttagtccacacagcttctaaaccaacaggtactaaatattctacactgaaataacgatggctgtggtgtacggtccgtccttcagttctgctggctgggcgcacgtgtgggctggccaccgccacatatgacgcagctggtaggcgccgagccagtgcacctgagccctgctgtgcgcctgagcatccaggatctcaaggtgcatggcgacaggcaccccatcctctgtcggccttggccccggcacactaagcggctgcaccactgtctcgctttcgcctgttggccttggccctggcacactaagcggccacgccgccgtctcgccctggctcctaccttgacgtacacgttccccaccaggtggtctcccaggttgtcacagacgttcatctcctctacttccccatacttctcctccatttctgtaaaaacctcctgaagggagaccacagtggtttaagactcgttatacattacaaagtgtcattagatataactcatgtatgtttattagcagagaaacattttaaatccttccaaacagatacagaagatcaacaggtctatcagtcacagagttcagttctctcacctcaaaaaactcatcatagtgttcctgcatctccacatcgctcacggcacctgcaaacaacagaaatcttgctggttagaacatgttaaccgagtgaactcttgtgtttaaactcaaactgctacagtaacacacacgagattatctagagaaaagcctggcagagctgcactctgcaggagcactcaggagactgagccacatggctacttgtgaatggtgtcaagtgtggtgagattttaaatgtccccatgacagtctcgattctggctactaaggtgttaaaatcacaaccagctttaatcagcatcaaaagggccacattttcagaaactgtgaggaaaaagttgactctcaaactacaaattttttttttacacccacaagatgcagtctggctctgtcgcccaggctggagtgcagtggcaccatctcagctcactgcaacctccacctctggggttcaagcgattctcctgtctcagcctctggagttgctgggactacaggcgactgccaccacgcccggctaatttttttttttttttttaatttttagtacagacagggtttcaccacgttggcaggctggtcttgaactcctgacctcaagtgatccgcctgccttggcctcccaaagtgctgtgattacaggcgtgagacaccgcacctgggctcaaactaagaaatattaaaattttcttccttttaagatttagagtaaaggccaaataagcacactgatgtcttcccctcttctataagtttaaaatgaaacctgaaagcagggtcgatgattaaaagctgatgttcctaactagtcttttatggactgccagccatggtatgctctcaaattcttctgatgtgattaaaatccaagcaaccatgaagattcagtaggacagttcacgcaaccttacggtattgtggacgccctcaagtaaagggaatgttacaatgttttgctgatgaaagcattcttttttttttcttttttttgagacggagtctcactctgtcgcccaggctggagtgcggtggcgcaatctcggctcactgcaacctccgcttcctgggctcatgcgattctctgcctcagcctcctgagtagctgggattacaggcgcccacaaccacgcccggctaatttttgtatttttaatagagatggggtttcaccatcttggccaggctagtcttgaactcctgacctcgtgatccacctgcctcggcctcccaaagtgctgggattacaggtgtgagccgccgtgcccggcgcaagtattcttaagttttatattcccaaactattttcatcagtttattcttcataattcacatgtattaggtaaaatcatgtctgttgcgtgggtaaatttggcaaatttacactctatccccatcatcattctatcaaatttaattaatttttttttcttttgagatggagtctctgtccactccaggctggagtgcagtggcgtgatcttggctcactgcaacctccacttcctaggttcaagcaattctccttcctcagcctcccaagtaggtgggactacaggcgcgcaccaccatgcctggctaatttttgtatttttagtagagacggggtttcaccatgttggccaggctggtctcaacctcctgacctcacgtgatctgcttacctcagcctcccaaagtgctgagattacaggcatgagccactgcccccggcccactctatcaaattctagagttctctaaacctgagaaatcacagagctggtgtatcaacaaacatgttccaatcagctagattaggggctggcaaaagcctgactggtttccagattgggccggctgccttagcctgtgcacccaacgtgggcatctgactgctggcacacgggtctttgagcttgctcaaaactctttttatcttttttttttttttttttgagacggcgtctcactgtctccaggctggagtgcaatggcgtgatcttggctaatttttgtagttttagtagagacggggttccaccatgttggccaggatggtctcaatctctcgacctcgtgatccacttgcctcggctttccaaagtgctgggattacaggcgtgagccaccgtgcccggccccctttttatctttgaagataaaaaataacttcttattttctaattctgagaatgatttaagttcactttctaacctatccggggctgttttagttatttttgaacttccaggaatctgctttcgaacccaaattttattaagtgtaactactcggacagcctgccaatcatatcacaggatatcccaattggaaagctattgggaatgtaccttcctccccgagtagaaatcaagttataaacggccaaagtagcctattccaaagggcagattttaatatttcaaattcacttccttcccacataagaagaatgtgaagaggagaaaattattcacatgctcaaagttttagcaggtttgagaaatggttttggggtgattattttaaattattggctatatttgttctgcttaaaatgtttcaatcaaagtgacttgaaaggcagagacaactgcattaagatacaattaaaaacttatttgtgactcagcctatgttaaatactacaacttggaaaataaagcagttttcttacagaaatatcattcttaaactgggattgatagttaactttaacccacgcatttgaagcttatttttttacatactaaagggtatgttgaaaagagccagtaattttaggtaattgatttcttcctaaaatgacgaattagaatttcatctaatttgtacaatctggactccagaattggaatataacgtaattgctaaacttttagtttgtagcatatgcaaaacaaaagtgctgtgaactgcaaataaagacacaatgaaaactaatacaacattctattgtcagtcaagaaagcatatacagtccccaaataaacgatcagggcaaagaattaattactgttactcagtcatgtacttccattcacttttatcccagggcagggttgttaacaaaaattatttaataagtgcatatagaaacaatttccctccgcctattgatcttatttccttaaaaaacaaaagaaaacaaacaaacaaaaaaacaggtattttaaaccaagggttaccaagtaaatcctgctaccatccgactcagggaaagaaatctctactatcaggtcagtattagcactgaaaagcatttagtgtcttggcaggaaaagttgacaagaaaatctcatccacacatagaaatgtgcaccactgtgcaaggaagcacaatccccaggccacccagtgcagggccagctcgagaggggaatgccccctgggatcagctaccccatgtcggtcaccccattaactgaggggctctggttcaagggtgtactcaatttaggcttgtggatatccaagggcacctcaatttttactgctttaaaacagaatggtgaatgggaagtgcctatctttggtttggactttctgattttaacaagagtccaggtgttcattttaatttatccataaatgactaaattctaatgattctatagttggatggctgtaaaaatcaaattttagttttctgaacttcccaatcatactcatctatgatatctccttctctaaaaattatcattaggtaaatattcacaatctaaatttagtatttcccagtacaggaagatattggtaccatctactgaatgcccagttttgatctatttctaaatggagcaaaccaattccatctcctagagctggagactgtatccaggcagtgtgtggacagaacggacaatcttttctgccaagggcctatttgagtggagcacccccacacgggttagacgggtcggcacggggctggtgggtgaggaactcaggggtcagtgcaagctgcagaccctcatttggggaacgctctcagcacaatgctcttacaactacagggtgcactccaaaatggagttcaaggaaaaaaggctaatgagaaataaaatctgaaaaaataacttaaaaagtttgctttttaaaaattccagaaagtgagagaaacattcaaattttgttgctctaagagggaagaatatgactcgacgtttaattccagtacattccctctaggatgacggccaaagtaaaggaagaaggggcagcagcagctccagactgtttttttttttttttttggagacggagtctcactctgtcgcccaggctggagtgcagcggcacgatctcagttcactgcaacctccgcctcccgggttcaagcgattctctgcctcagcctccctagaagctgggattgcaggcatctgccaccacgcccagctaatttttgtatctttagtagagatggggtttcaccatgttggccagattggtcttgaactcctgacctcatgatccacccgcctcggcctcccaaagtgctgggattacaggcgtgagccaccgcgcccggcccagctctagactgttttaaagggcaccctttccagttactttttcccttttaacacacggtgggagttcaaatctccaaaagaggtttccatggggtcagtgggacgaaagctccttgccacctctagtgaaacgcggtccttgacactagcacggcagaccagatggagtggacactgagctctgacacgcaagcccagggaaccggggaaggaacttgtatgaacttacagcgcaaaccgtcagcagactgggaagagttttgagggttacggtaaatgttcaagagggcaatggtctgaaatacaaaacgcaacaactttatattatggaaaattaaaggtaaacacttaaccggctgcctctggcaagtgcttcagttgagattcagtgctgaaaagagagcaagttattttctggagaagcagaggcgttttctcagttggcggctgccttgaatccctaacactgcggtgtaacggaggtctcatgatatgcccatcttgtacttctgcttacagaacgtgaaaactctccttttcaaaattccaattcaggtaaaagcacaaatagtttgccaggctagcaccaaaatgttcttagatgtggcagaaaatttttaatgaactcggaaagaataatgcttacataaactgatggaaaaaattactgtattagagaaatacaattgttacatatcatgaaatctccacttcctggaggaaaaattataatggtgaaataaaacccacacttactgggcaacttaccttattgattccttaatattcctaagagttttaattttacacaaagaacttaataaaggccaggggttcagtcactgtaaagaccaatgaatggctcaaaatgttgaaatccgtttcacatggacggacctgctctcatgacaaatgtcaatcaatggaggtggccgggccagtgaccctccctagaagggataagcctcctgaacgtggccaagtatcaagttcttgctgtgtgcgccaaggagttccagcaccttgtcctgtttgcaacagctctatgtcagcagctcagaagccaacattatttgtctcaattaagagtgggctctttaacaccattgttttaaaaaaatttctccaactgtgggacttacagtgtgagccgtcagccgtctgtgcactgttttggggattacgatagatgttttgaatcaagatggtctgcggggaaaaaaaaataaaaaggggaattctactggctgctgtgcatatattagacaattgcaaagagacaatttgtttgcaaatggctaaacgtttgtttttttcccgcaagtcagacatttgtcttctgaagagtacaccaaaaccatcatattatgaaaacagagtttgagcagtgacttgggtcaagtcagccagcaaccaagaagaaactgtattgttttgattagtcccacgttttcaatgttaaagtgttttaatgcaagataaatagtagaatactaatattttcttgtacttcaagctagcagacaccaagatgtggaaaaattcacgttataatcatattcctcacacaagataatttttcaaaaccaaatgcgtaactcagctgtctgcagtacatcaagttctctggtctcctagcaaaacaggcacaccaaacaggtctgtcaactgtcatggacacccggctctgatttacactttcttggtgggatctctgtttacataatacaatagcttaaaacatttgctcttttccgatccttcttttaaggaaaaaaaatccttttagcccttgtgctttaaactggatcaggcagacttgaaaccttacactgtaccgttcttcttaaaatcaagttgtctgaaaaaacaaaccatgtttaagttagtaggctaatatattacatgaatcttaacgtccatatcactgtaagcagcttataaagaaacccaccctgaattatgctagagatttacaagctaaagcaatcactcgcatgatttagaaaaataaatgtttagtctcaacaatatccacgtgaagcagttttgtaagtggtggttttataaaaccagccagctccatttctagctctgtttaaaggggagtggttgtatgaagagttcctcagtcaaaggtgtgcagctgggaagcccaccccacctaagagggaggtctgacaaactgtccacactgaaccactcagacctgcatcagggccccgtttcttccataagccgccaagtacagccctgagtcaactgaactcaggcctgggaggcttcccaaagctgacttgactcagctttgaactgaaatgaccgtaccatgacaaccctgatgaaaagctaaactgagcccaattattcaacagtaaaattcagttggtctcactcaggtattctggcagtggctatttaatgaaggaagcttaacgtaaagaggcaatgcagtctaatgggaaagccaagggtggctaggattgcctaaaaccaaccaaaacaaacccacgcatcaaactaggatgcttaagctgacacatactactgaccccatcgagctccaatgggctctccccagcactgacctggaatgcctaaattaacttcacatttcacattctcaggtaatctatgatccagaaaaacataaagaaagtgcctccagccagattaaagaaaacttttagaatagggaacagttgatttctctcagcccaacacttgggacaccccccaaaatcaaagaactgggtggtcacttaagatgcttggttataccacaatccatggccactggtttagttaggggagattcggttcataaatcaaaacattaaagaaaaaacaattgcaatacacagaaaatgtaaagctagttctccaagattttgaaatttgtaaaaagaaactcatgttcagagctatcaaaagacagactgctattatactaaccacttggtaattagcataatggagggaaaagccatcatcctcttcccttctaaaaacactgtgtgctgtggggtcgtccatgggcttcaaccggaaaaaacccatgtttccttctcccagctcacttacacaaagtggtagattttcttaaatgcttacaggaaaacgtatacagacagatgtgagctcaaaggcagagcctggcagctcccagggaccacgcataatagctactcaacagctcagaggctgcacatttagacttcaagggtgggttggaaggagttccccagccctccatctggaaagacttgggcatcgattttcaaatttcaaatgttctcatcaacgtgggcacaagttttctgctccgattagaggtgccttctccctttaatccgtaagtgatcctttatagtgtaccaacctttgccttttcttcaactaaccaaaaataaaactatcaaaactcacaacttttgattgaactgaactcagagcggatctaagcccaagataacaggcactcctcaattaaccaaacagacccgctaagagcaatttacggcccattttctacctttcagcttaatttttcatgtttccatgacgtgatgcgactcgctgtttcctcagctagggatgtgaaagtgaggacgcagccagagaagctcgagcagcatgatgggcctggtgacaatcacgctaacttggaaggtggctccatcacctctactgtctggagacagcaaagagcagaaagcccactccgtgtccactggtgcctggaggaggctaacccaaggctggcacggccaccccctctggacccatgtctatcagagggggtagggaagatggcagggcagcaaatatcaggcacagccaacacacaaacatcaaaaactgatttttaaagtttctctaatgataaaaacaaggagtggtggtctcagaccttccactggaagtcgatcacctgcctcactattatttaaataaaagaacacacttatgaacacaaatggaaaatacaactacgagagaaaaaatgacttgcttaatatgtagaaattaactgtctttgaaaagaacatgaagtttttataatttacatgaaaaaaaggcaaacaaacctggctaaacgtcggtttattgtgcaaccgagagcacctgtctccatgacgacatgctccaattttgaaataaaatgaacagttgactctgtaagggaaaatgagagctgattattttgctgggaagatatcaaacacatggaatatgtcagcagcatgacatacactatcaaattacttttaacctcacagaaacatgacacagacttttttccgtggtattaagcacctcctcttccttgctgtattttaggacaacgtaacttcaacttccctttctgcaaacacactacttgttcagcaaagacggttctaactctaacccgcctcctcctcattcaaatcccctccactttcctaactgcacagctgttctgtttgtttcttaaatggagtattaaattagtctaaaactaaatgtaacttaggcagtatctgttctccagttctccacgaccaagttctctcttgaaaacaccggtgtggtgagggttaagatcccaactctgctaccagctgcttgggcttgggcaagtcaccctagctctcagatgtcatctgtaaatgatgacaatgccaatgtggcactgttctgagagtcagacagaacgtatgtgtgcttcacatatggtgctcatgaagtgctatcattatctaaggaaaacagaaaacgaagttcagagtctctctaaacgcatgacaccagaccaacagggagtttcaaaaaataggtctgaagtaaatcaattctcctggtctcaatacactgaaaacaaactattaggggactgaccgaacccaccttaggaaccaccttacgtcaccttctgtctctactgcaaaaccctcccttaatactgttcaaatacgctgacaatccagatccatatccaatggaaccagcaatcatgcctgtgtgccagcaatgtcagggagggaagccgatctctgatgaattaggacatcttaccagacagactttgttcaaaattcaatttttttttaaccaagtgccattatgttttaaacagtcaatccagagttaagattgaagggcctcaacctcagtgaaatctaatggaccatgaagactgactagccactgatttattatcaggtagcaataaagatgggaaagtccaaatttatcaggagaggaaagtgattatatatatttgcaaacttacaggtcttgagattatttaacttgattagacaatagcatatctttaggaagtcatctaaaaataaagaaagcttatttaaaaactacctcagaatgggcaagccctgggcctcaacaattaatatccaattattccacacaattaaactacagacaagctattaggatatccctgaatctagaaaacatctataacttcaaacatataataagctaaacattttttaattggtagagatctatattttattcttagcttaaataataattaaagttaatatgaaccatcagcttcatttttcaggagttgatcctgttccctggaagctaaaaccccacgtctccctgaaaagaaaacacaagtaacctagattaaataatcaacttttctgaattaaaaccatgacctttatagtatagcccaatagattgaaatgtggttgcttatagcagaaatatagggagatagacttttacaagacagaagtcatgccacatgcaaatatgaaaaggagaaattaatgatgccccgatcctacatgtgttagttcttcaccctaaactcagaagagtctcttgttccgatagagctggtctattcattcgccaagatcataccgtgagttccttaaggataatatccaaattttacccatgtttaagtctccagaaactgacctatagttgacccccactaaatgtttctggagtgactataactggtagattttggcttaaaattttgctagaaatatagcctcctcatccaaacaacacaggagattctaccatgtgtgaagaggacattttacaagatagactccatcctggaaaagagaaacattttaaatagcgtttgaaaaaagtggcattaaaaacatctatgacaaacttaggggtttatcattgaaaacataaagtcatgttaactttgtatggcactgaagaatgccaagataactaaagagtagattaagccagatgctgagtctttaggttttcaaagtaagaattatccttcaaacgtctgaaaacattccatttagtctaaactacagccaactcactggaaattagtacgtgccaaggtggcaattaaagctgaaattaaatgttttgcttttaacctaacgattgattagggaaggcatgcaaccttaaggaaaaaatcaaaacatctttttccttatatcagaattgtgtcttcaagaacagtcaccgacttacaaattttcaacttagatgatgggtttatcggggtattaaaggcattttcgattcatgatgggtttatcggaacgcaatcccatggtaaatccaggagcacctgtatgttaagagcggatcacgtctcttgtggttagatagttaatccagtagtctccaccatactttttctcgtcatatctccttactgccggcccagcggtcgcttaaacaggcaagaggctggctaagtggataaaacaccaacgcttaggaccctaagttagataagcgactgaatactggcgaggctggtaccagagcttgctcgacaggacattcacagccgaaagttggaacaaacgtgtccacgtccaaaaggcccggatgctccaggcaactttcagcgcggctcgaggcggcttccgggagtcggcgactcggaggcccggacgtcgggcgatcagccagtccggaccccaaggccggagaaagctcggccgcggcgccccgaaaagagaccccattcattctgcccgctccagttttccgccgcgcggcccacgaggcggcggctccggagggcgcgcaaggggccggaagggccaccgctccttcccgccgcgcgcccctcccccgccaccgccgcgccggcccgcctgggcctccccggtcgccctcccaccgcctcaaccaccctgcgccccgatcgcgcccaacccccggcggggggctcccactcacttgtctttctcggtgccgaagatggaggccagatactccgccatttcccacccgccgccgccgctgccgtcgacactgctgccgacgccgccgaccctgccgacgccctcgggagacgtcacccggacgcgacgacgctcttccccgccccgacgtggcagcgctacccagtcaggcgaggtgctgcctgcgcgtgggcgggacgcatgcgcgtagggagcacgtagtgcgcgtgggaggctccgccttttcggtcctgggaacccgcgccccctgccggtgccctccccgcccggccctagctctctcgccttctcgcccgcccggcgctggccctgctggatcctgcgcgccggggactgggggctggcagtgcagaccgaacccggggccgaggggcttctccacagagccgcctggggctcggtggggggcgctcagctcgaccccagctaagggagcactaggaagtgcgggcgtccccttccctgcacccttgcggggcgggaaccgtcgacctagaagaaaaaaaaagctgaggcaaacttgatataagtagagaggttatttgggccaagtttgaagattgcaacccgggagcatagcttcaagttgccctgaacataggatttgcaacagtgacaagtgggtttataaagcttaagaggggggcagttcttaaatagctcaccaagaatttacatgaaaataacaagctattaattggctgtacgttgttctttatatcataattccaggaaaggaagttcatgggtgaaggcagcgggtccggagcaatagtgcctttaaacaattgccaggcatgggtggggaccgctgaagccgcatagacctgtctctccgggccggattaacctcgcacgcctcacatagctcggacgctctgtgttgtttttctcttctcacacccctctccgctttaccctccctcagcgcttgccaggtgcgacctccccggggccctgcactcttgcagttgcctggccaaggccacccacaggtggagctggaaggccagtgacctgcctctgggataccctttcagtctcctcatgtcacaaggctggaaccattccgttggaagggttctattcctctcctgcgttttaaccccatcaagcagccattttcatctggtttcccacattcatcaactcacctgcgatttacctaatttccaacgcaactatcaactctgattaggtagaagtcagagagacagggcctattttacttacctcctccacaagatgagccccagactgtggggcaggaccatgggatcctcttagctcggctagagctgaatgctgagctctagtgtttgggcggatttgcgtgttagaattgcatttctcttggcaacagagcatcttcctacctgggaaagatgagcaaactggaaacctgtattagaaacagtagggcctcagaggtttaaaccaaaaagtatcttgagacagggctcaatcaatttagaagtttattttgccaaggttaaggacaatgcctgggaggaaaaaaaacacggtatcacagaaacagtctgtggtctgtgcctttctccaaagatgactttgagggcttcagtatttaaaggggaaaagtgggctggaggggaaagcggaacagtgtggtaatccacacgttgcaagagaaaagaagcaggttgggaacagtcgactgtgtacagctcactcctcagcaaatcagcactttacataagagaagcggatgttgaaccttctatctgtagccgtctgcttaggaacgaaaggaaaggcagctgcttacatgactcagctttcagctcattcttttccttttgacagagtgaactggggtcctgacttttgtgttcctttcgcagaggtgaggccagagaagtgacaagacagatgccagtccagcaggtgggcatgtccagaaagtgcagcctcaggacacggtctgggaacaaagactgctggagagttggaagctggcaagaggctctcagctgtgaagtacctggggtgggggagaagtggtcggagaaagcagaggtaaggtctgtgcgtgggaactgaactgaaatccacagctctattacaaggaattaatctggttactagaaccagggtagatgatcagaccaggcagggccaccagtaccatccacccatttttcctgagaaaagaaaaatagggtagtctgagctctgtgaggtgtgcagaatgatcaggcccagagaggcaggagtgtgggacttcattcagcgcctcttccaccatagaagcaactgtccagggcaattgtttgatggaatttttgctcctgacaggctgcctcacccattatcttcttgttcacatggaattagtgatgctaagaacgatgcatagccaatcagcaccttctgttattttaatgcaaattcttgctaacaacttagggactgcctcttccttttccttaaaaccccactgtgactgctgctaatgggaacatatgttcagggcaacctaggggcatgtgcccagggagccatcctcaagctttgggctcaaataaactctatacttaatcatatttcctgaatttcattatttgaggttgacattttggcaacccagataggacctgaagcaggccttcagggattgccactaagtagtggcatcaatagttggagccttggtaccagcacaaacgactgttgtttactcgacctcactggggctggcaggggtctctggtaaggccagtcttgggatctgaatcctcccagcttagttgaagattgagacttacacactaataatttgatagggttagaactgaagctccactgaaaggtaggagtttccatttttattctctagagattctgttgactgcagatttgtgattttcacttctgtctgaggttttgcttgtctttttacagtttgcagccttttctctcattcgaaatttggtcaaggagaaagtgtcatctttaaaactggccatattctgaaacttggttcaactgacaaatctaaacattcttcttcttcttcttttttttttttttttttttttttttgagacagagtctcgctctgtcgcccaggctggagtgcagtggcatgatctcggctcactgcaacctctgcctcctcagttcaggcagttctctgcctcagccttctaagtagctgggattagaggcgcctgccaccatgccctgctaattttttgtatttttagtagagttggggtttcaccatcttggccaagctgatcttgaactcctgacctcgtgatccccctgcctcggccttccaaagtgctgggattacaggcgtgagtcaccgcgcttggccattttcttctttagtgaccaaaattcctccccttaggcatttttggtcattcagaaggaaaatctaaattatggacacttgtgcttctagagcagacatgcatctgcagagacggcagctggattcgtggacaatgcttatggtgccaccttctgtcagtatctagaaacatggtctcacttaacccgtgaagaccccagactataatagctaaaatggggcgcctttaaagtaactagtttatgcactcaataggaaaaatctgcatctaaaatttaaaaactgagagagctatttttcaatgatacttagaagcttctaaaagaagttctgatgaagtcatttctttgcaagaagaaaacagaagattatctgaaactatttcttttgtttgtttgttttgagacagagtcttgctctgttacccaggctggagtgcattggcgtgatcttggctcactgcaacctctgcctcccaggttcaaacgattcttctgagctgggattacaggcatcccccaccttgcctcgcaatttttttttttttttttttgagacagagtttcattcttgttgcccaggctagagtgcagtggcacgatctcagcttgttgcaacctccccctcccgggttcaagcgattcttctgcctcagcctcccagtagctgggattacagacacccaccaccatgcctggctaatgttttgtgtttttagtagagacagggtttcaccatgtaggccaggctggtctcgaacttctgatctcaggtgatccaccagccttggcctcccaaagtgctgggattacaggtgtgagccaccacgcccagccatccacagttctttttaaaatttagaagtagtttcaggctgggtgaggtggctcacacctgtaatcccagcactttgggaggccaaggtgggtggatcacgaggtcaggagttcaagaccagcctggccaagatggtgaaacctcatctctattaaaaatacaaaaattagccgggcatggtggcgggcgcctgtaatcccagctacttgggaggctgaggcagagaatcacatgaaacccaggaagcggaggttgcagtgagccaagatggcgccactgtactccagcctgggtgacagagtgagactctgtctcaaaacaaaaacaaaaacaaacaaacaaaaagaccatggaggctttctcctgtttgtttccagctgctgcttctccttctgcctctgggatgatctaaactcatctctttctgcctgttccctcagctcccatacatctcttaagcagtgtttttggaattccacaatgcacacatttccttctctcaaaaaggggaaagtatatttaaatttggaacagactgggtgcggtggctcacacctgtaatcccagcactttgggaggccaaattgggcagatcacctgaggtcaggagttcgagaccagcctggccaacagggtgaaaacccgtctctactaaaaataaaaaaagattagcggggagtggctgcgggctcctgtaatcccagctacttgggagactgaggcaggagaatcacttgaatccgggaggcagaggtcgcagtgagccgagacggcgctatcgcactccagcctgggcgacaagaaggaaactgcgtctcaaaaaaacccaaaacaacaacaacaacaaaaataaaaaataaaaaataaaagaaataggccagaaaagaaatgttagctcaagcctgtaatcccaacactttgggaggccaaggctggtggatcacatgaggtcaggagttcaagaccagtctggccaacatggtgaaaccccatctctactaaaaacacatgtggtggcatgtacctgtattcccagctactcgggaggctgaggcaggagaatcgcttgaacccagtaggtggaggttgcagtaagctgagatggtgccactgcactccagcctgggcgacagagcgagatgctgccaaaaagaaaaagaaaaagagaaaggaagggagggaaggagggagggaaattaaaaaaataaaatgctaacatccagggaattagttcagctgagatcagatctgaaacaagtcaaaaccctttaaatgctcaaactgcctgctctggagcccctgcagggtttgtcagtgctccagcctgtgggccagaggctatgagtctctacaaacatgaggctatgtttgcagcctgggttcaatttccagtcctgttttttttttttttttttgagacggagtcttgctgtgttgcccatgctggagtgcagtggcatgatctcggctcagtgcagcctccgccttccaggttccagcagttctcctgcctcagcctcccgagtagctgggattataggtgcccaccaccacgcccagctaattttttgtatttttagtacagacagggtttcaccatgttggccaggctggtcttgaactcctgacctcaggtgatctgcctgcctcggcctcccaaagtgctgggattacaggtgtgagccaccgcgcctggccttcttttttttttttttttttttttgagatggagtttcgctctcgtcacccaggctggagtgcaatggcatggtctaagctcactgcaacctccacctctcaggttcagtcaattcttctgcctcagcctcccaagtaggtgggattacaggtgctcaccaccacgcctggctaatttttgtgtttttagtagagatggggtttcaccatgttggccaggctggtctcgaactcctgacgtcaagtgatccacccacctcagcttcccaaagtgctgggattacaggtgtgagcagcaagatttctttttctgagctgtctttagagtggttctgacgcttaggaagactgctttgcatttctttggagatgcttggttcagccttggttaagtcatgaccttcgttatgccattaccttggttaaatctttgtttttgagatggagtctcgctgtgtcacccaagctggagtgcagtggtgcgatcttggctcactgcaacctctgtctcctgggttgaagcaattctcctgccttagcctcccgagtagctgggatgacaggtgcatgccaccacacctggctaatttaccttggttaagtctcactggttttgtgagtaacttgaaaatgtccatttcgttttttttttttgagatggagtttcgctctcattgcccaggctggagtgtaatggcctgatctcggctcactgcaacttcggcctgccaggttcaagcggtcctcctgcctcagcctcccaagtagctgggattacatgcatgcaccaccacacctggctaattttgtatttttagtagagacaaagtttcaccatgttggccaggctggtcttgaactcctgatctcaggtgatccacccaccttggcctcccaaagtgctgggattacagacatgagccaccgcacccggccaagttttttctttttttatatgtaataagttggataaagtgtttataaaaagttaaaagtaggccctcaagcaggtaaagtaggcttgcttcttttcagagctatccatgctgattccaggcatagagaatgcctcctttgccctattcattaaagggcttcaccctgaagtcagtaatctaatagagaaacaagctaagttgaaaagaccctgtgatggttaatattagctgtcaacctgattggattgaaggatggtaaagtattgttcttgggtgtgttgtgagggtgttgccagaggaaattgacattggagtcagtggactgagagaggaagacccaccctcagtgtgggtgggcaccatccgattggctgacagtgtggctggaacaaagcaggtggaggagggtgggagaagctggcttgctgagtcttctggcttttgtagccacccagtgagttcacctagccggctgcctagatggagcggatttatcaggacaggggaattgcaatgcagaacgagtaatttacacagagctacctgtgcgggcgactggagttttattattactcaaattagacatcccaagaatttgcagatcagagtttttaaagataatttggcggctcaggaagtaggagtgctgattgatctggctggagatggaatcacagggaggtcaaagtgaggtttccttgctgtcttctgttcctgggtacaatggcagaactggctgagccagatagccggtctgtgtggtatcagctgatccatagagtacagggtcttgcagaataaatacctcaagcactgatcttcggattacaatggtgatgttatccccaggagcaatttcgggaggtttggacagccagaggctggatgacctttaaatcaaaatttctttttttttttttcaaagaagccccattttattacagagagcatacaaagccgtttcctcataaggaaaagtacagcttcccttctccagggtgacagatgagccttttctgaagttctcagctttctcttctatcgatatttcccatgtcagttaaagtgtttgtagagacagctgatgcgtttattgaggttgtgcagctcatcagcaaacattctgtttccaaccattttcttctttagcatacagcgttgcaattcattccccttccaatctcgaagccatatggggtccctgatcagcttttggggtgcttttcaaagtttcccaggatcctgatgttgtcatacactctgaacatggccatcctttcgttccaaggatcaactactttggggggtaggagccttataccaatcaatctaggaataccaagaaagaagcttctgcatgccacacctagtcccacaggcgcctacctgccctacataagaggctccctgccatttctctagtctgccccttcaacagcacaccaaataagcccaagaatgaggaccagatgtggccttcaagaagacaacaggaaccgtccctgtcgacttcacacgggtactaacgtgaaggcagccaccttgggccttaaaatttctaatcttgtagctaatttgttactcctacaaaggcagactggttcctaggcaagaaggggatctttctgggaaatggctattatcaattttgtttcagagtcaaactataagctaaattccttcccaaggttagttggcctgtgcccaggcatgaacaaagacagcctaaaggttagaagcaagatggagtcaggtaggtctgatctctttcactgtcatcatttcctcagttgtaatttttgcagaggcagtttcactttcatctttctcctgtgctggatgcctcctccgttccccctgcccttggacatcagactccaggttctttggcctttggactcttggacttaagccagtggtttgcttgggactctcgggccttcagccacagattgaagcctgcactgttggcttccctacttttgaggcttttggactccgactgagccactcctggcttccttcttctgcagcttgcagacggtgtatcatgggacttcaccctgtgatggtgtgaactagttctccctaatatactccctttcatatatatgtctattctgttagttctgcccctctggagaaccctaactaatgcagacccttgtgtaactttgatatccaaaatatggctttctagcatttagctggctattttgaaactctttgtaaaaaaaatttatatatatgaaggaaatctccatttgtaagggtgtctccctccctgcacccaaactgctagaaactgaagatggggaagacattggctgaagacactgtcttacagtttacatcacagaccttgccttcggtggaaatacttttcctggcaacctcgtcttcactaggtgtagggaccagccccacaggatcggtgggtttttctccccatgtgcagagacgagagattgtagaaataaagacacaagacaaagagataaaaggaaagacaggtgggcctgggggaccactaacaccaagatgcggagaccggtaatggccccgaatgtctggctgcgttgttatttattggatacaaagcaaaaggggcagggtaaagagtgtgaatcatctccagtgataggtagggtcacgtgggtcacgtatccactggacagggggcccttccctgcctggcagccgaggcagagagggggagagagagagacagcttgcgccattatttctgcatatcagagacttttagtactttcactaatttgctactgctatctagaaggcagagccaggtgtacaggatggaacatcaaggcggactaggagtgtgaccactgaagcacagcgtcacagggagatggtatgccttcggataactgaaggtgggcctgaggccctccacaagagatggaggagtagagtcttctctgaactcccatggggaaagggagactccctttcccggtctgctaagtagccggtgtttttccttgacactgacgctactgctagaccatggtccgcttgacaacaggcgtcttcccagacgctggcgttactgctagaccaaggagccctctggtggccctgtccgggcataacagaaggctcgcatgcttgtcttctggtcacttctcactatgtcccctcagctcctgtgtctgtatggcctggtttttcctaggttatgattgtagagcgaggattattgtaatattggaataaagagtaattgctacaaactaatgattaatgattttcatatataatcatgtctatgatctagatctagtataactcttgttgttttatatattttattatactggaaaagctcgtgccctcggtctcttgcctcggcacgtaggtggtttgccgcccacaactaggcttttacctacacccttcttccttggtttgaattcagctctgtgcttttgagatgtgaattttttctactttgtttcacctcagtcatccctttagaagtgccaatttagtgttgcctagctaacagttgcttagggatcatgtaaaagggggaaataaaaactatttgagagcataatcaggttaagtattaatgctaaaacttactttacaagttagttggtcttgctaagatttctctttggtagaaatggggaattggagagaagattctttataaaaactataagatctgcttctgtctgtatgtctatatgtttatatgtgtcatgtgtatgtgatatttcactaccaaaatatatgaaaaagctataattaattggcttaaagaagggactgcttggctgggtgcagtggctcacacctgtaatcccagcactttgggaggcgaaggtgggtggatcatgaggtcaggagatcgagatcatcctggctaacatggcgaaaccccatctctactaaaaatacaaagaaaaattagccaggcgtggtggcaggcgcctgtagtcccagctactcaggagactgaggcaggagaatggcgtgaacctgggaggcggagcttgcagtgagccaagatcgcgctactgcactccagcctgggtgacagagggagactgagtctaaaaaaaaaagcacagtgatgctaggccagagtctgggcccctgtgtctgaacagtaggttttcttggagtattggtgtgctctttaatagaaaattgtaagagttgggccgggcatggttgttcatccttgtaattctagcactttgaggccatgagattgagaccagcctgggtaggatagtgagaccctatcactgttattttaaaaattaggaaaaagaaaattgtaagagtttataaaaggtttttgggaatcttactttgtatggtcaaagctgcctgagaatggacgattgataatacactaatataaaagttaaatcttgttttctctgttgaataagaatttcatgttgtgttaagaagagatagtaagctgggtgtggtggcttatgcctgtaatcccagcacactgggaggccaaggtgggtggatcacttgaggtcagcagttcaagaccagcatgaccaacatggtgaaaccctgtctctactaaaaatacaaaaattagccaggtgtggtggtatatgcctgtaatctcagctacttgggaggctgaggcaggaaaatcgcttgaactcgggaggtggaggttgcagtgagctgaaattgtgccactgcactccaatctgggcaacagagcgagactctatctaaaaaaaaaaaagtaaaagatttgtttaccttttgaataaactgcaaaaaaagggggctgggagaatttgcctcatgctatctttattatgtctcttgattgggaactgagtctctgctctattttagagtaaaagagttgctctttgaaatctttatttattttttttattatactttaagttctagggtacatgtgcacaatgtgcagatttgttacatatgtatacatgtgccatgttggtgtgctgcacccattaactcgtcatttacattaggtatatctcctaatgctatccctccccactcccctcaccccacaacaggccccggtgtgtgatgttccccttcctgtgtccaagtgttctcattgttcaattccccccatgagtgagaacatgcggtgtttggttttttgtccttgcgatagtttgctgagaatgatggtttccagcttcatccatgtccctacaaaggacatgaactcatccttttttatggctgcatagtattccatggtatatatgtgccacattttcttaatccagtctatcattgattgacatttagacacaagtctttgctattgtgaatagtgccgcaataaacatgcgtgtgcatgtgtctttatagcagcctgatttataatcctttgggtatatacccagtaatgagatggctgggtcaaatggtatttctagttctagatccttgaggaatcaccacactgacttctacaatggttgaactagtttacagttccaccaacagtgtaaaagtgttcctatttctccacatcctctccagcacctgttgtttcctgactttttaatgatcgccattctaactggtgtgagatggtatctcattatggttttgatttgcatttctctgatggccagtgatgataagcattttttcatgtgtctgttggctgcataaatgtcttcttttgagaagtgtctgttcatatcctttgcccactttttgatggggttgtttgtttttttcttgtaagtttgtttgagttctttgtagattctggatattagccctttgtcagatgagtagattgcaaaaattttctcccattctgtaggttgcctgttcactctgatggtagtctcttttgctgtgcagaagctctttagtttaattagatcccatttgtcaattttggcttttgttgccattgcttttggtgttttagacatgaagtccttgcccatgcctatgtcctgaatggtattgcctaggttttcttctagggtttttatggttttaggtctaacatttaagtctttaatccatctcgaattaatttttgtataaggtgtaaggaagggatccagtttcagctttctacatatggctagccagttttcccagcaccatttattaaatagggaatcctttccccatttcttgtttttgtcaggtttgtcgaagatcagatggttgtagatgtgtggtattgtttctgagggctctgttctattccatttgtctatatctctgttttggtaccagtaccatgctgttttggttactgtagccttgtagtatagtttgaagtcaggtagtgtgatgcctccagctttgttcttttggcttaggattgtcttggcaatgtgggttcttttttggttccatataaactttaaagtagttttttccaattctgtgaagaaagtcattggtagcttgatggggatggcattgaatctataaattaccttgggcagtatggccattttcacgatattgattcttcctatgcatgagcatggaatgttcttccatttgtttgtgtcctcttttatttctttgagcagtggtttgtagttctccttgaagaggtccttcacatctcttgtaagttggattcctaggtattttattctctttgaagcaattgtgaatgggagttcactcatgatttggctctctgtctgttattggtgtacaagaatgcttgtgatttttgcacattgattttgtatcctgagactttgctgaagttgcttatcagcttaaggagattttgggctgagacaatggggttttctaaatatacaatcatgccatctgcaaacagggacaatttgacttcctcttttcctaattgaataccctttatttccttctcctgcctaattgccttggccagaacttccaacactacattgaataggagtggtgagagagggcatccctgtcttgtgccggttttcaaagggaatgcttccagtttttgcccattcagtatggtattggctgtgggtttgtcataaatagctcttattattttgagatatgtcccatcaatacctaatttattgagagtttttagcatgaagggctgttgaattttgtcaaggccttttctgcatctattgagataatcatgtggttttcgtctttagttctgtttatatgctgatttaatatataatgttaaatcaataaacattatatgtttattgatttgcgtatattgaaccagccttgcatcccagggatgaagcccacttaatcatggtggataagctttttgatgtgctgctggattcggtttggcagtattttactgaggatttttgcatcagtgttcatcagggatattagtctaaaattctctttttttgttgtgtctctgccagcctttggtatcaggatgatgctggcctcataaaatgagttagggaggactccctctttttctgttgattggaatagtttcagaaggaatggtaccagctcctccttgtacctctggtagcattcagctgggactacaggtgcccaccaccacatccggctaatttttgtatttttagtagagacggggtttcaccacgttggccaggctggcctcaaactcctgacctcaggtgatctaccagcctcgacctcccaaagtgctgggattacaggtgtgagccaccatgccaggccgtaaaccacttttcgaaaagaatcaaagtaaaacagtaattgtctacggatgacaaaagacttatagtagccatagttaaagatgcctgtgacaaggaaaattggttatttctgtggcatctaacaatgtaacatcataatcataattatgactgataacatataccaggacatatcaaaattttagaaatctcatatgattttggaacaaatattaatcacacatttatacttgtgtgatacacatataactcaaagaaagttaaacgctattgtttatttgacaatgcttcctgtatgattctaacataccgagtaagcctactatttggatttccaggagtttctatttgttatgtccaggttatgtccacattagttcaggtcaaaaagacttaattttagaatttgaaatttgatttttggctgggtacagtggctcacactggtaatcccagcacattgggaagccaaggaaggcagatcgcttgagcccaggagttcaagatcagcctggacaatatgatcaagcctcatctctaaaaaaagaatttaaaaattaagctgagtgtggtggcgtgcatctgtagtctcagctgctctagaggctgaggtgggagtactgcttgagcccaggagggagaggttacagtgagccatgactgtgccactccagcctgagtaaaagagtgagaccctatctcaaaaaacaaaaaaaaaattgattttgggaagtatgtcaaatatcaaaggtttaaaacatttgatatcaaaatatggccagacacagtggctcacgcctataatcacagcactttgggaggccgaggtgggtggatcacctgaggtcatgagttcaagaccagcctgaccaacgtggcaaaaccctatctctactaaaaatacaaaaattacccaggtgtgatggtgcacacctgtaatcccagctagttgggtggctgaggtaggagaatcatttgaatccaggaggcggaggttgtagtgagctgagatcacaccactacactccagactgggtgacagagcgagattccatctaaaaaaaaaaaaaaaggaaaaaagaaaacatttgatatcaaaataggatcacaggtctgtgtaaaataagtcattcatttagccagaatgggagagagcagtggttctcccagcacggagtttgagatctgagaacggacagactgcctcctcaagtgggtccctgacccccaagtagcctaactgggaggcaccctccagaaggggcagactgacacctcacatggccgggtacccctctgagacgaagcttccagaggaacgatcaggcagcaacatttgctgttcagcaatattcactgttctgcagcctctgctgctgatacccaggcaaacagggtctggagtggacctccagcaaactccaacagacttgcagctgagggtcctgactgttagaaggaaaactaacaaacagaaaggacatccacaccaaaaccccatctgtacatcaccatcatcaaagaccaaaggtagataaaaccacaaagatggggaaaaaacagagcagaaaagctgaagattctaaaaatcagagcgcctctccccctccaaaggaatgcagctcctcaccagcaatggaacaaagctggacagcactaaatacccacaagagaaagcaggaaagttctaaaattgacaccctaacatcacaactaaaagaactagagaagcaagagcaaacacatttaaaagctagcagaagacaagaaataactaagatcagagcagaactgaaggagatagagacacaaaaaacccttcaaaaaatcaatgaatccaggagctggttttttgaatagatcaacaaaattgatagaccgctagcaagactaataaagaagaaaagagagaagaatcagatagacgcaataaaagatgataaaggggatatcaccaccaatcccacagaaatacaaactaccatcagagaatactatgaacacctctacacaataaaactagaaaatctagaagaaatagataaattcctggacacatacaccctcccaagactacaccaggaagaagttgaatccctgaatagaccaataacaggctctgaaattgaggcaataattaatagtctaccaaccaaaaaaagtccaggaccagatggattcacagctgtggtcccagctacttgggaggctgaggcaggagaatcgcttgaaccctggaggtggagattgcagtgagctgagatcacactgctgcactccagcctgggaaacagagggagactctatctcaaaaaaaaaaaaaaaagaaaagaaaaaagaaaagaaaaaaagtggtttacaatcagctgcagtccaaagtttatcttttcttcaaggaaattcatggaaaggacactgagaagtactcttgaatacaggtttctaataaacttagagatcataccattggactaggtaaaaacttccacaacactaatgaaaaactgatgcattcatgaagatttctaatccagcatcaggcattacaataattaattacaccggactgaaattatttttatgacttttttgttgaaacattgctaactctttttgttttgttttcgagagttaagaaaacttttgtttttttttttttgagatggagtttcgctcttgttgcccaggctgtagtgcagtggtgcaatctcggctcactgcaacctccgcctcccgggttcaagcgattcttctgcctcagcctcctgaatagctgggattataggtgtgcgccaccatgcctttagtagagacggggtttcaccatgttggccaggctggtctcgaactcctgacatcaagtgatccaccctccttggcctcccaaagtgctgggattacaggcgtgagccacagtacctggccaaaaactttaaaaaaaaaaatctgtttagagcttatagcaattgggtaaaatatatttttgtgagcaaaattgaagcatttatctttctacctgatttctccagaattcagaaactatgaatgagtattcttattttattgtaatataattatttgcataattttagtaaaaaatttttttcctttgttaacagaacacaattgaaggcactggttattctagcaaggctttgactggaatggcatattttcagatatgaccagactgctctgaggaattcaggttggctttatagagtcaataaaaagctacctggaaagagtggccatgtaccttatctatacagttcccttacaaggttcctgatcttgaggtaagtaaataatgtccctttctgacaggcccaggaacctcaaatattttggggccttgagaaaagaggaactcacccagttcatgcaggtgttacaggcacaatctgaagatgaatctttggctttttaaagcctcagattaaaaagtctaatctgaaattctctatgaaaattccttcaaagccaacttgaaaagaacctttatgatcagtcattattcttgttccactttatgcaaataatgaagctgaatataatgctaaaacttattttacaagtaacttggtcccactaagatttatctttggtagaaatggggaatctgagagagaaaaattatgtttcagaagaaaacgattttatacctattgatagattccagccctgatgattgtttctgagtttttgttattttcctgcaatccttaattatttcctggctacaacaagtctttaaagaaggtctgggttttaattttctttatgatgtttttagttcactcataaattgaattgttttcttctgttctggcatacacatttctttctgattataattcttatgtgtattatatttctactatgtatctctctctctctctttttttttttttttttgagatggagtttcactcttgttgcccaggctggagtgcaatggcttgatcttagctcactgcaatctctgcctcctgggttcaagtgattctcctgcctcagcctccagagtagctgggattacaggtgcttgccaccatgcccggctaattttttgtatttttagtagagacggggtttcaccatgttggccaggctggtctcaaactcctgacctcaagtgatccacctgcctcagcctcccaaagtgccgggattgcaggcatgagccaccacgcccagctgtatctctcattgttttacttcccctaagaaaaccaaattcatggtattctgaagactagagatgattcaacaggcaacagcagttatataaattgatgacttggctgaggtctcatttttgccaccctgtgatgccatcccaatttggcttttggctttcttcagattcctcactgagaggtatccttccctgatataatttggatatttgtcctcacccaaatctgatattgaaatataatccccaacattggaggtggggcctggtggaggtggttggctcacggtggtggatttctcacgaatggcttagcaccctccctttggtgctgtcctcgtgatagtgagttctcatgagatctggtcttttaaaagtgtgtggcacctcacctgccactctctccctctttctctcttgttcctgctttccctttgtgacatgcccactctccctttaccttttgccctgattgtcagcttcctaaggccttcctagaagctgaacagatgccagcaccatacttcctgtaaagcctgcagaaccatgtgccaattaaacctcttttcttatatattacccaatctcaggtatttcttatttttatttatttatttatttacttatttatttattttcatgcaagataggttcttactctgtcacccaggctagagtacagtggcatgatcatggctcacggcagccttctcctcccgaggctcaggtgattctcccacctcagcctcccgagtgactgagactacaggcatgtaccaccatgcctggctaattttttttgaatttttagtaaaggtgaggttttgtcatgctgcccaggctggtctcaaactcctgggctcaagccatctgcccacctcggcctcccaaagtgttgtgattacaggcgcgagccagtgcagccagctggttatttctctatagcaatgcaagaatggcttaatacatctcccctcccctacatgggacaaggccatctgataattaaccttcctagcaactcaggactaagctcctgaacataaagggagccaaaacaatttgcatttttctatgaggccttctttgaaaggtcttgatgaaaaggggagaaatggggaaaaaaatagcacagagcagtctgagctatgtgaggtgtgccaaagttatcaggcccagagagacaggagagtggggctttttgttttgtttttgtttgagacaacatagtgagagcctgtctttataaaaaattttaaaaaattatccaagcataagggcatgtgcctgtggtcccagctactgaggcaggctgaggagagaggattgcttgaatctgggaggttgaggctgcagtaagctgtgatcacaccactgcactccagactgggtgacagagtgagaccctgtctcaaaaaaaaaaaaaaaaaaagaacccactgctgctaattggagcatctattcaggggaacttgaatctaggctcccaggtggccatccttaagctttgggcttgaataaactttgtacttaatcatattttctaaatctcattatttaaagtcgagaattcattcctcccttcatctgttcattcatatgtctgtcctttcacccaccaatccgctcatctagccatccacccatttgtctgttagtccgtccatccatccatccatccatccactcacccagacatccatccatccatccatctgtcctttcacccacccatttattcatccattcatccatccatctatccatcccactgagtcattcatccatctatccatccatccatctgtccgtccatccatcttatattttggggggcatgtctgatgtgtcagatactgtggcaggtgcacagacacaaattcggaagacagatctccacttagaagtgtgccaggcacctcagctcaacatatctccagctgacttcattttatccttctcctcccatctcttgacgttctgttcaagcatttagtaaatgccagtcatctatagcctgagcccacctgggttgccctaagttgtctgattcacatccattctaattccttggcttctctcaaccatgtctgctccttttcctcctcttggccattcctgagtgtacctggatcactacagcagtatctatgctgtttcctccttttctaggtgaccatttgtccttctgccagagggctctgtgggaaatacagattcgatcctgctgtttcttactgggaaccctccatggctcccagtccctggaatgtgccgggcaactttcagctcttggtcgtgggagcctcctgcctgtgcacagtgtgttcttccaggacccatgcccactccctccttcccagcattccagtttggcccttgaggcctccttggagtcatccccctcccagatgtgcaatgcattttgggttctcaacagcttcccctccttacctgcaaaggttgaacagacctggatctgctatcctgctttgccacttcctgctgcatgacctgcattatgaagttctctagactcagggtttccattggctaataggatcagccaacctgcctttgaggagtggacgaagcttggcacttagtaggtgcccatgaggcatcagaaactgcccttgttgaatgatgctctaatgcggtgttgacatctctgtcctactagactggggttgctttgaggactccaattctgtcttttcatcctgattccatgatggaacagacccacaggcccttgtcagcattccaaaaagcaaaaagctgtgaaaatgaaaaggactttttttttttttctgtaaacttggtgccaaaatttgcaaaagctgacctgacccaaggtgttggcagcatcccaacactccctctgttacaggcacctctgctggttgctgacaatgtatatgttttaatttttaaaatgcatttgtctttttgtgaccatgggtttaattgcactgtgaattcatacaaaaagggtagcatgtacccagtgctcactgtgggaaggacacatggaaacactctctttgtcaatagtgcagaaagcatcagtgatgttgggaagccatcaaaagacaagcagttgggctgtgcgtggtggctcatgcttataatcctagcactttgggaggctgaggtgggaggattgcttgaggtcaagagttcaagaccaacctggccaacatagcaagatcccctctctattaaaaaaaagacaaacagttgaaaatttataataattgtgattaccaagagccattgaaatatggaaaacacagggtcagtggggtgtggtgtagggagagagatcttgaccaggaatggatggaacggaattggcaatgaagtagtcactgtatgccaaggagtggtttgttggttatgaaagaagctggaatacagcaggaagaactgaactttaaaggtgagcatgaatattcaagaagtgtcatggtgtaaaacaatctgcatagctgtggtggaaaggcttctttcctgatcaggaaacagctgaaaattacattgatggatttgtatcctctgaaaaccttagtctcaaccaggcgcggtggctcacgcctgcgatcccggcactttgggagtccaaggcaagtggattgcttgagcccaggaatttgagaccagtctggccaacgtggcaaaaccccatctctgcaaaaaatacagaaattagccaagcatggtggtgcatgcctgtagtcccagctactctggaggctgaggtaggaggatcactgagcccagggaggttgaggctgcagtgagccaagatggtgccactgcacttcagcctgggtgacagagagagaccctgtctgaaagccaaaaaacaacaaaacctaagtcagaacaagtttgtgtagctgatgagtcaggcagcttcacctgtgctcctttctagacaggcaggatggttgcggagagtcacaacaggcgtccaggaggaaaggcacgagatgatgctggccaaagctagttgtggttggaaaaagccactggtgtgaacggtgtatgctagtatgcaagggaacatatactgggaactcgagccatgttttctgcatggtttaataatcctttgtatcagtgccaggaattcactgcagataagctggtctggaagaaaaacgaacattttgttatttctgcacagctgctccacacattcctttcctgaaagtcttttgaaaagcaatgtttctgacatttactttccacgatttgtgaagggagttttacactccaataagagtgaatataaatgattttttggggggaagggggaatcctgccattaacagaaagcagggcttcctgactaagttcactcacaaggctgccattcacacagtcacaaatgctcggacaggatggacagttccactaacgtgcgcttggttgactgtgtgaaccccaaccatttgagacaggcctcagttaatttagaaagtttattttgccaaggttgaggacgtgtacccgtgacatggcctcaggaggtcctgacaacatgtgcccaaggtggtcggagcacagcttggttttagacactttggggagacctgagacatcagttaacacatgtaagatgaacattggtttggtccggaaaggtgggacaactcaaagcaaaagcggaactcaaagccggagggggcttccaggtcatgggtagataagagacaagtggtcgcattcttttgagcttctgatgagcccctccaaaggaagcaatcagatatgcatttatctcagtgagcagaggggtgacttgcagtagaaagggaggcaggtttgctataagcagctcccagtttgacttttccctttagcttcgtgattttgggggcccaagagattttcctttcacaactgcacgagcactttgacctaaaacaattcttgaaaccgaacctggagataaagcccatctatggcagaagaaggtgatagcaaaccgcattattgaccctcaaagtttatcaaccaaaagtggagtcaggagaaagtcacagagaagagatgctgaacctagaaatggggcacctattgtgcctgcctcgcatgatggagaaattgctggaatcgactgaataccagtgacaatgggaggggaaatgtcggggagatgtggaccctggggagtccccacagactatctggcaatatctgtggcctgctaactgctggcttcaaggacatttatcagtgagcaggaggacccctgaattagagagatgcttaggtgtggcactggtgttgtgggaggaagtgccgagaagcccattgacacggtgctgccccaggacttcagagactcttcaatccatcctccatgctgcctccagccccatgacctcagcaatgtatcactgctgtgctccctttcccaagacccccaagcagccagatgtagcctgattcattacatgtatgcatacaggtgtcaatctaaaatagtcaaaagggccagaatctagtttaaggagagtttattcaagtgcaaggtttaagtccagccatccaggaagcacagattccaaagaatggaagtcagtgttctgaagtatagaagtttgggaccatgtatatagataaagtttatggaagcttaccagaatttcaacatctttaggctttaatgcatagttacaatggtctgattagtcgaggtggtctttttctttcaagaaaggtgtatttggccaggcatagtggctcatgcctgtaatcctagcactttgggaggccaaggtgggcagatcacctgagggcaggagttcaagaccagcatggctaacatggtgaaaccctgtctctactaaaaatgcaaaaattagctgggcgtggtggcaggcacctataaccccagctactcgggaggctgaggcaggagaattgcttgaacccgggaggcggaggttgcagtgagccaagatcacaccactgcactccagcctggacaacagagccagactctgtctcaaaaaaaaaaaaaaagaagaagaagaagaagaaaggtgtatttaatcttccccactgaagatgcaaccgtcatgaggtctttgcgccatctgatctgagttgggtacaggacaataaaggaggcagctaatctgtaacagagatcagtgatgggaaggaggagatctggtctctgggagactgaggcaggaggattacttgagctcaggagttctttttttttgagacgagtctcgctctgtcaccctggctggagtgcaatggcgcgatcttggctcaatgcaacctccacttcccaggttcaagtgattctcttccctcagcctcctgaggagctgggattacaggtacttgccaccacgcctgcctaatttttgtatttttagtagagacggggtttcaccatgttggtcaggctggtcttgacctcctgacctcaagtgatccacccgcctcagcctcccaaagtgctgggattacaggtgtgagccactgtgcccagtcgagctcaggagttccaatccagcctgaacaacacagcaagaccctgtctcaaaaagaaagaaatatgacaatatgactttgcagcgtttcagaacatcaataactttgcagttcttcatgtttctcctagtcatgtccagaacaaggaccctggggaagagagttaagctgtaatctaagaagcagaatttgcaaatatgctactgactcagtctccagggcttaacatcccctttgacataataaatttagagggtcctgaaattttatttgcttttaaacgactttttttctttcacagacatttggcttcacttgaacctgtgtttgaagctttagtgaacattgtctttgggagtaagaagtactagaaaatttatggtatgtggttatcttgctatttcatgaactactgtattactatataaatcagctggaagcaagctgtaatcctgtttatgggatatttgttccacttaccatgatgaatttggctgcagaaatatcagtatatttgcctttggagtcctgcctcagacccctgatgagggctatgcaatctatagtacttgcttttatttgtttattctgctgtaaatggtttgtttgaattttttttttttttttttttttttttttgagacggagtctcgctccgtcgcccaggccggactgcggactgcagtggcgcaatctcggctcactgcaagctccgcttcccgggttcacgccattctcctgcctcagcctcccgagtagctgggactacaggcgcccgccaccgcgcccggctaattttttgtatttttagtagagacggggtttcaccttgttagccaggatggtctcgatctcctgacctcatgatccacccgcctcggccttcctaagtgctgggattacaggcgtgagccaccgcgcccggcctgtttgaatgttttgtttgcgaaaatagccttaattttcccttcactgtttccatgcaccttagaaataggacttcgtagccggttgtggtcatacacacctacggtcccagctacttgcaaggctgaggtgggggtgtggcaggccaggtctcactaacacaggcctccataacaactgtttcagtactgaccaagtggtaaagttaaatattaaaagctgaaagagccagcgcccttatacaaaggctggaatgtaacaaaagcccaccaagagttttgcccaggcctttcctgggctttaaagcatgaagagataacaaaggaattcttaacaggacccatttaggattaaacaaattttattgggggtctgaagaaactccccaggcctccacaaacaggctttactggagactaaaggaactccccaaacctccatgacttagcaggaggccagatccgggttttcaccccagcacctggacccagctaggttaattaaattcactgaggctccggaggaaggtcttctggactcagatcttagttatggattagaagttaatcacttatgtctttagatggatgcacactcacacgtagacacacagctgagaaggtatagaagctctggaaaacgctgtcattttaagttggtctggtgataatttccaggccttctctctgtaactggttacagaaataaaaactcccttctctcctagttcatctgcatcttgtcactgggacatgagcataggtggtctaccttcagtttggtctgtgaacaggaggattacttgagctcaggagttctagtccagcctgggcaacagagcaagaccctgtctcaaaaagaaagaaagaaatgaggatatgagtttgctgctctttaaatcgatgactttgcagctcttcatctgaagaggtggcgtctgtttctcctgtttgagtgtggcacatccaggagagtggctttgagcagtggtgtggcagacgtgactgtaggccagccctgagctgaggctgccaggggactgcacacttcttctctcagctctgccagctgctgcactgtgtctgggccagcccgctggagcacagagttcagtgcattgggacagctacagcccattgcatcgggacagcccacagcaacaagacccacctgtcgccactgcaggtgcgtgagggtgcccggctgagagcagacaaaccgcctagcaggtggcttttcaagcggaatcacagactagctccatcgctgtggtgaacgttctccccagtgccaggattccacttggcccctgactgcttgagcagccgatgtgacagccatctctctgctgccgtgcatgtcggctgggctggagccagtgcatcaggaagtagacgcagaagtggatcaggagcaaaacattcctgagagctggcagaagctggcgtctggagccgctgggatgcgggtatgggctctctcagtggcggaggaacagcctcctggcagaaccaaaggttgctttgtgccttcgatgctgctgctggccagagtggttttctgtctcagaccctgtaccacgtgtctgttctttctcattttttacttaaaggagaagaaaatgattatgtgtacatgctggtggcacacataacttagtattaagtattacaaagtcttacaggcagggcacagtggctcacgcctataatcccagtattttgggaggctgaggtgggcagatcacctgaggtcagcaatttgagaccagtctggccaacacagtgaaaccccatctctactaaaaatacaaaaattagccaggtatggtggcacacacctgtaattccagccactcaggaggctgaggcaggagaatcatttgaacccgggaggctgaggttgcagtgagctgagatcacaccactgcactccagcctgagtgacggagtgagactctgtttcaaaaaaagaaaaaaaagtctgaaaagtcttacagacccaaggaagaatttgtcttcctctgtgagaggggagatgtgctctgatgatataggagaaaaccccaaaatcagtatcagcccaccaaccagggcagtgaagccgcacccagatgcaccacacatggcagtccatgaacagccgggcttttgtaaaggccggtgctttatggaatgacgctctgccgggcccgggttctggggcttccagtcactcagtcttttgtttactcatccattgcgtatttcttgagcacctcctatgaaccagatgctgcttgaggaactggggttaccagggcaaatgagaccaggcccctgccctcgggggccccaggttcagggggagagagaagacaaaaaaaaggaaaagaagtgagctaatttcagatagtgcttagagctgtggagagaatgcgtggcactcggaggccctgagcagcccagatggtgaagcagctgtggttgtggtgttgagagtgtgaccctgaaaagatgtagagttgagagtgagtgaaggcccggggtcggcaggggcggggtggcggctggagcatgagctctatgtggaggagcagtgagcagaccactgtgcccggaacttggtgggggtccagggccaggtgaggctggcagagtttggggaggggctcctggcccaaatcaggtgggctgtggcatggagcatgatgtcatcctaaaaccatcctaaggacacttcagacggtcactttctcaatctgggccttggtttgttgatctgtggaatgggagttgcactagttgattcctggggtcccttctgaaacccccaactttgtgagtccatgacatgaaacataacccccctgccatggtctgcagaaagctgtaaactctccctccccagggagacagacgctcgtctccctggctgcccaaagcgcagggagtctcatgttctgatggctctttctttctctctttctttctttttcttttcttttttttttttttaagatggagtctcactctgtcatccaggctggagtacaatggcgagatctcagctcactgcaacctccgcctcctgggttcaagcaattctcctgtctcaacctcttgagtagctgggattacaggcatgcaccaccacgcccagctaatttttgtgtttttagtagagacacggtttcaccatattggtcaggctggtctcgaactcctgacctcaggtgatccgcccccctcagcctcccaaagtgctgggattacaggcgtagccactatgcccggcttggctctcactttcgtgttctttccatgtaatcacacatgaatggttgtcacaagatctcacagggaaataatttagcaagtgaatctcagttttaaaaaggaaggtgtttgtgttttatcagcatctgtaattgatcagaccatatagttaaacccctaagaagacttaaggtcttatctccctcagctgagacttctgtgacaaatgccacagatacacagattaaacaacagaaattgatttctcacagttctggagcctggaaattcaagatcaagctgctggtcagtgctgttcctagtgaggtctctcttcctggtttgcagacagctgccttctcattgtatcctcagacggtgaggagagagagagagtgagcaagctctcttctctcttcttataaaggcactaacctcattatagggccccatcctcataaccttattacctccgagtcctcacctcctaacaccataggaggttagggtttcaacattttaattttgataaatattcagttcataacaggtctgcacctggggtccatataggtcagttttatttccagcagaataatggtgatctgtaccaccattacacctgcctgtatgcaggcaacccatattcatggctttccataaatggctttattctttccgaaaatggcatttttatttcgcttactgtgtgtgtgattaataccttctcatggttcaaaataaaaataaccaaaaagtcccctgctggctctgtgctcagcctcctacaacctcaccaggagcagccagtgtgaccagtttcatgcgggccctagagatattttatgtagttacaagcaattgcatatgtatttcctgttttggcataaatgttagcacaccatacatacgttgttctccatgttatttttatgtaataagttggagatatttccatatctctagaaggaaggagatacgaaaacaaagaatttctttttgtgtgtgtgccacaatagcaaagaaatttcttcattttttaatggtaaaatacacgtaacataaaattcaccattttaaccattttactaataagtgtacagttcagtgatattaagtacatttgcattgttgtgcaaccatcactaccaccaacctccagaactcttttttgtcttgcaaaatcaaaactctgtccccgttaaacactaactgcctgttctccttccctcagcccctgacacctaccattctattgtccgtctctatgcatatgactcctctaagaaactcaaacaagtgcaatcatttgttcttttgtgactgtcttttttttttttttttgagacagaatcttgttctatcgcctaggctggagtgcagtggtgcgatctcagctcattgcaacttgcactcctgggctcaagtgattctcctgcctcagcctcccgagtagctgggattacaggtgtgtgccaccactcccagcaatttttttttgtttgtatttttaatagaaacagggtttcaccatgttggtcaggctggtcccaaactcggattacaggcgtgagccactgcgcccggcctgtgactgctttgttttactgagcatattgtcttcaaggttcatccatgtggtagcatgtgtcaaaacgccttcctttctaaaggtgaataatatttcactgcatgtacagaccacattgtgtttatctgttgacctgttggtggacgcctgggttgtttccacctcttggctgttgtgaatgacgctgctgtgaacatgaatgtgcagatttcctcatttttcaaccactgcaggctgttccacgcagcagaggctggtacacctactctctacggtgcacatttagggagtgtccgtttttcactaacaccaacagctgcaacagtaatcttgtgcacaggtgactgcacatgtgcgactctgtatttgcagcatacagttctagaggtggcatggctgcatcaaatggaacgtgcgtttgtaatttggttaccccatgtctctaaggcattttagtttggcagctgttagaagctggtttcggatcaaatcttgcaagtggcgggagggttgtgggtgtctttatcaggctagagtcatggaaagaatgtgcccctttcagaccttgacctccgttggggttacatctttaaaggcaccgtctttccactttggaaatggaagtgtcccacttgctgtgctgacggacactagagggcggagttccccatctttcaggcaatgtgaaggctcagtccacttctccacttctgcaactacagaggtgattatttgggaccactggattggggggagaaagtcagtgtctcccaaggggtacggcacaggacagagaaccagtattggagctcagacaggctcgggggactgggagatggaagccatcgcctttaccttgggcatttcatcttaggtcccatggaaacaggggccatgggttggtacttatcatttcttttaaacagataatggcatacagtaagtcctcaatttcatcacagcttcctggaaactgtgactttaagcaagacaacatataatgaaaccaattttaccataggctagttgatataaacaagagttaaattcctatgtcataggctgggtgcggtggctcacaccagtaatcccagcactttggaaggccaaagcgggcagatcacctgaggttgggagttcaagaccagcctgaccaacatggagaaatactaaaaatacaaaagtagctgggtgtggtggtgcatgcctgtaatcccagctactcgggaggctgaggcaggagaatcgcttgaacctgggaggtggaggttgcagtgagccgagatcacgccaccgcactccagcctgggcaataagtgtgaaactctgtctcaaaaaaaaaaaagaggcatatttctgctctcaaaacatcaccagaacaggtgtggtggctcacacctgtaatcccagcacttcgggaggctgaggtggcagatctcttgaggcaaggagttcaaaaccagcctgggcgacatgatgaaaccccatctctacaaaaaatgccccccaaattagccaggaaaggtggtgtgtgcctgtggtcccagctacttaggaggctgaggtgggaggattgcttgagcctcagaggctaaggttgcggtgagctgtgatcacaccaccacactccagcctgggcgacggaacaaaaccctatttccaaaaaaaccccacaaaaaaacaaaaaacaccaccaaatttctaaagacccaaacacttctaatattaaacattgaaataaatgtaaactatccctacatgtagaggtagctacacctacataaggaagattaatacaaacaagtgagatcatgatctacccaatatttgggatgtctgtgagtgacggcggtggtagtggtggtggtgaaatcacggaatcaatgtctgcaaagcacacgctcttgggagcacctcctcccaccgcacagctgaaagacaagcgaccgtgagtatggcggctccttgagcaccctcacacgcggcgtttgttgtcatgcgtttgtgtgattaccgtaggctttataatttttatttgataatttatattcatgtattcattcattttccaacttgctttctccagttcagagtggcaggtgaccagggcccatcctggaggctcagtgccaaggtgggcacccgccctggataggacaggcctccatgggacacccacactcactcggactaggcccatgtagacatgccgtgaggctgaggtgtatacttgggatgtgggaggaaactggaggacctggagaaaacccgcgcggacctggggagacctcctcaatgctccctagaatgaaacgatgggatttgaggacctgctgtatttatttgtcccaatccagcggccctggccttcagtgcacagtagtccctgctgctgggcacacatcccctcatgctcagtccattgaccaggactgggcacatggcctcacctagctgcgggcagtggcttctgccctggggcaggcagctgctccaggtctggagatgagccccacctccaggtgcagctgctccaggtgtggaaacggggctctacctcgtggggagcgtccgctgcgggccacaaccttgctgggaggctgcgggagatggggggtaagaggggtgatgttgaggctttccctcctcggcagtgaccggcgcagccctccccagtgtagctcccccctccccacccctccctccatctggaacacagcacgggggctgccctccagccctcagtgtgcagggcttgcacaccttggcttgcagggcatttgggggatcccagtggggcaactgccagctggagagatgctggtgcccagccgtgctgctcctgggggcaggctgggtaggggctgaggggccggagtgagcggtccacagtcatccaggaacaacagggctctcacctggcagggctcccaggcacgttgatggagggagggtttcctcagtcctctcccccagcccttactgggcagtacccccacccaccatactgtctcttgcctgggtctcaggtggttggcgctgtctggcccctgcctctccctctgtcccttcagctgaagcgggctccacgccatcccaggacttcccgcgcggtctgaagcacagccacatccggtctgaccgtccctcacccctccctcacccctccctcgccccccctcgcccctccctcgcccctccctcgccccccctcgccaccccaggaggaaatagaggctgagtgtccgtgccctgcagccgagcagccacccttgcctttggccccaccttcgcctgcctggcggccgtcctgtcacctgtcattcagcccttgctgtctgctgggcacgtgccctgcaggtggggtgcacggcaggcccatgagtgcccaccatgcctcgccattcaggaagccacccaggtgctccgggcggtgtcagggcagggtgcgtctgtgcggcgtttgcatgtgtccaccgtcctgaccgggggcagggccacgtcccacacatctttctgcctaacttatgatgtggcaaagacacatcccgatacctctcccgggtgggcctgtgagctgggctctgtgacgccaaggcccaggacctgctcagccctgggaagatggaactggaggggaccttgagatggctggcccagccccttgtcttatagacagggagacagcagaaagggagatggagtcaccggccaggaccccagctatgagtgggagctggaccaggagttgagtgtcctgagccacctcctccctgtgctgggtccactctcagaaacactccaggtctggaggcagacctggaggcagggcagggcagggcagggagggcagaatggctatgatgtggtgaggctgtgtccccacccaaatctcacctcgaattgtaatccccaggtgttgaaggagggaggcgattggatcatgaggcggtttcctccatgctgttctcatgatagctagtgagttctcatgggatctgatggttttataaggggctcttcccccttcgcttgctcttgctctctctctcctgccaccatgtgaagaaggtgcctgcttccccttcagccatgactgtaagtttcctgaggcctccccagccatgcagaactctgagtcaatgaaaactctttcctttagaaatcacccagtctcaagtaagtttttttttttttttttcagacagagtcttgctctgtcacccaggctggagtgcagtggcaccatctcggctcactgcaacctgcgcctcctgggttcaagcgattctcgtgcctcagtctcccgagtagctgggattacaggtgcctgccaccactgccagctaatttttgtatttttggtagagatggggtttcaccatgttggccatgatggtctcgaactcctgacatcaggtgatccacccacctcggcctcccaaagtgctgggattacaggcgtgagccaccgcacccagccagaagttctttatagcagtgggaaaatggacgaatccaggcttgcatcagtgttccggggcagcccaacaaagtaccacaaaatgaggggcttaaaccatagacatgtgctctgtcgtggctctggaggccagaagtctgaactccaggtgtgggtggagccgcgccccctctgagattctaggagagttcccttcctcgcttctgccagctgctggtgggtgccggaagccttggaactctgatctgtggcagcctcactcctacctctgcctccgtgtttacacgacctctctgtgtgtgtgcgtccaaatttctctcttcttacagggtcgccagtcattagatgagggcccaccttctccagtgtgacctcatcttagcctcattacatctgcaaagaccccacttccaaataagatcacatccgtaggttttgaggttaggacttgaagacatcgctttgggggacacagttccacccaatgcaggtccttggtgagccaggtagaatgagctggtggtgtgggcagtggcttgagagagccgctatgccagtagctttgtggaagtttcggggccgtggtttctctgagaccgtttacataggttctcagtaggggctggaagaggctgtgggcgtttgtgtcagggtgactgggtggaggtggccggtctgcatgccggttcatcaaggggaggatgtcccatggatcaggggccagaatggagccagctgcctccctccggctcccagagccaccccaggccatgcacaactttgagccctcagaggtccagttcctcggtcggtctttcctcagcttcctcctctgtaggccatggagctgaccatcctgcctctggcagctgtggtgctgtttaggggaacggtcattgccttcatctccattttatagttggggaaactgaggctcagaggaacgaaaactctgggtaggagcacagaaagagcagagcatgggcggtggacaaagagtcgccgtccctgacagtctcgcggtcggaccttggtcacgtgtggtctggggctctcgcctcctcccagctctgaggttctctgcatgaactccaaggaaacagcctgttctgggatggcaggagctggtggacttccaagttagaaacacaaagatgccatgagcttagggttctggaaggccctggggtgtccgctaggtgtaaggtgctggtggccctggtcaaacaacccctaagggtgggcagagtggggggcaggtgggaaaaacagattgacactcccagattggactccaggtgacggcctgctggtgcccacctggctagaactttctattcctttttgtccaggtctcatggaacaaggaaatcaaaaaaacacccgcccgtgcacaaatggatttcctgaacccttctgtgcgccagtccttggggacgcaaatgtgaatgaggcggcgctctgttgaatttccgtgcccaaactcaccaacgtgcacagatactgatgtgggaacacccgctataaggtggcctggagcagtgaagaccctgctctcttgtgaactcccgcaaccatggccagccccctggggctcccagaccttggcaatcagcccttgtggtttttaaaaaatttatttttatttttatttttagaggcagggtctcattatgtcacccagtgatatggtctggctgtgtccccacccaaatctcatcttttattttttttttttttgagacggagtttcgctcttgttgcccaggctggagtgcagtggtgcaatctcggctcaccgcaacctccacttccagggttcaagcgattcccctgcttcagcctcccgagtagctgggattaagggcgcagaccaccatgtctggataattttttttgtatttttaatagagatggggtttcatcatgttggccaggctggtcttgaactcctgacctcaggtgatccacccacttcggcctcccaaagtgctgggattataggtgtgagccaccgtgcccagccccaaatctcatcttgaattgtactcccataattcccacatgttgtgggagggacccagtgggagataattgaatcataggggtggtttcccctgtactgttcttgtggtagtgaataagtctcatgagatctgatggttttagaagagctttccgcattctctcttgcagctgccgtgtgagatgtgccttctgtcatgattgtgaggcctccccagtgagcccattaaacctctttttcttcccagtcttgagtatgtctttatctgaagcatgaaaacggactaatatacccaggttggagtgcagtggcgccatcttgacttactgcagccttgacctccagctttcaaacgatcctcctcccttggcctcccaaagtgttggggtcacaggtgtgaaccaccatgtccagccagcccttgggttttgagatgctcaagttacaggtgagaagtgctttgtttgttccggaatctgtgtcctgagagggttaaagacaagggctggccagcccctagaacctggccgtgtcaccaggggagctgtggaagcaggagggaagcaggagggaggcagcagttctgtgccgtggggcaccttgggcttttcttttttctttctaatagagaagcaacattttgaataaatccacaaaagcgtagaagatcatctcatcggtttctgtgtgtgaagtttcatgcttatctaactgcatttaggaaaattcacgtgtacatttttcccaaggggagcgagaggatgtgagcgttctacttgttcatttcatatctgcttttacaaattcatagggagggtgaggaaggagctgtggttctcattgcgactgatgtttgattatttgattcaggaatttcacttctgggaacttgacttagggaaatgctctcagagacgcgtgcgatgttgtttgtaacaagcacatgtggagatgtcccgggcccctcatgaggcggctgcttgtgtccgtttgtacctcttgccagctgtgcagtgtcgctcagctcccagaaggagggaggcaggtccaggcattgatggttagttttgtttttttttttgagaaggagtctccctctgtcacccaggctggagagcagtggcacgatctcagctcaactgcaacctccacctctcaggttcaagcgattctcctgcctcagcctcttgagtagctgggattacaggcatgcaccaccatgcctggctaatttttgtatttttagtagagacagggtttcgctgtgttggccaggctggtctcgaactcctgacctcaagtgatccacccgccttggcctcccaaagtgctgggattacaggcatgagccaccgcgcccagctgatgattagttttatccatgttcttcctgctgcagctcacccagaggccctggtggggcaagaacttggctggccagggttggagcaaaaacaccagccttggctgtgggtgaggcaggagtgtggccgtgcaggtgtggcttcctcgccgcatctccagggcgctttccctgtcctgtgagctccttgagggccgaacctgggcctgtcagttctgggctacctccacttcccagcaggccctcaagaagggttccctagatgtggtctattcccacgggagactatcattcagccgtcgaaaggaagggaattctgatgcaggctagacaggaatgaggacattaggctgagtcaaagaggccagtcacagacgcacaagtacggtgacctcccctttgatgaggccctggaggagtcagattcacagagacagaaagcagaatggtggcaccggggctgggggatggggaacgggggcggagtgttgaacggggacagagtttgctttgcacgatgaagagttctgtggctggatgtcagggatggttgcacaagactggaatgtacttgatgccactgaactgtgcacttaaaaatggtcatgatggtaaattttacgttatacatgtttcaccatagttcgaaaaatactttaaaaaaagcaccatgtcccttggatttagtgataccgacccctctttgtccctctgcttcccagtggtttcttcttgcccctgggatttgtagggatgggttgcccctccacacctgtgggtgtttctcgtaaggtgggacgagagatttggaaaagaaaaagacacagagacaaagtatagagaaagaaataaggggacccggggaaccagcgttcagcatatggaggatcccgccagcctctgagttcccttagtatttattcatcatttgtgggtgtttctcgaagagggggatgtgtcagggtcacaagacaattgtggggagagggtcagcagacaaacacgtgaacaaaggtctttgcatcatagacaaggtaaaggattaagtgctgtgcttttagatatgcatacacataaacatctcaatgctttacaaagcagtattgctgcccgcaggtcccacctccagccctaaggcggtttttccctatctcagtagatggagcatacaatcgggttttataccgagacattccattgcccagggacgggcaggagacagatgccttcctcttgtctcaactgcaagaggcgttccttcctcttttactaatcctcctcagcacagaccctttatgggtgtcgggctgggggacggtcaggtctttcccttcccacgaggccatatctcagactatcacatggggagaaaccttggacaatacctggctttcctaggcagaggtccctgcggccttccgcagtttttgtgtccctgggtacttgagattagggagtggtgatgactcttaaggagcatgctgccttcaagcatctgtttaacaaagcacatctggcaccgcccttaatccattcaactctgagttgacacagcacatgtttcagagagcacggggttgggggtaaggtcacagaatctcaaggcagaagaatttttcttagtacataacaaaatggagtctcctatgtctacttctttctacacagacacagtaacaatctgatctttcttgcttttccccacaggatttaacaacaaatcctaatgcacgtgggggccagcggcagtgactgtagtccccttggcaggcgaaggcctgtgagtagccagtgctatgtctggcattctaggcagctcctggctcccgggcggatcctcctgttgcctgctgggccagcctcaggtcggcccttccagctctgtaaaactcagaaggcctttagggcaggcactgtgccactgaccccctctctgtgtcccagggcccggtacaatgagatgatcatggaattaaacagaacagaaccatgaggtgtccaccaggccatgccaggatgcactggcttcacctgtgattttggcaccagtttaaacagtgtcacttcattctgtgcttctcctgattagtctgccttctggccgatatatccctgggaggcaggtgcagacccctcttgactatgtactgtgtgcagttttggggacagagctctttatgtggccaaggtctggctgggcaaggtgtctcatacctgtaatcccagcactttgggaggctgaggccagaggactgcttgaggccaggagtttgagaacagcctgggcaacatagcaagaccccatctctacaaaaaataaataaaaattagccaagtgcgcctgtggtctagctactccagaggctgaaatgggaggatcacttgggcccaggaggttaaggctgcagtgaactgtgatagcaccactgcactccagcctgggcaacagagtgagaccctgtcgcaaaaaaaaaaaaaaaaaaaaaaaaaaaaggtcctttcccaggacgtcaggacgaatgtatggagcagcagcaggggtctcaacgagtgccgcgccgtttccagccgtgcgcacgtccctgtggctgccgcaaggaacagaacgacttggtcatcttgcagtggaagtcagaagcctgaagtgggtcccgctgggcgataatcaaagtgccagctggcctgcgttgcttctgaagcctctaggagagaatccacctccttgcctcttccagcttttagaggccgccctgttctgtcataactcaaggccctgcatatggcacaggtgtgactgttcgcgcccgcagctccttcaccaaccctcctgccaccctccttccctgctttcctgtaaggacccctgtggtgacgtcagggccacctgggtatccagaagcatctccccagctcgtgatccctcacttaatcccatctccagctgccttttgcagagtaatgtgcacattcatgggtgctggggacggggacatggacatcttggggtcggggtcattattctgcccaccacagccaacaattacaatcaatggggatgagaactggaaatggtcctgtatgattctcttgctgccaggcttgagagccagccaggagcacgctgggggccgagcgtgggaacgtgccacatgtgacggtgctcccacggctcagcgctgcttccagacacagtcctactagttggagcctattttggccacagctctcacctgcgttttggtggtgggaggggtgtttctgggttccaggtgaagttggttacacctcctgggtgttcaggcatcaatgttcaccttcatcaaacgtttaaaaaattgtggttaggctgggtgcagaggtccatgcctgtaatcccagcacttcgagaggctaagggggggtggatcgcttgaggtcaggagtttgagaccagcctgggcaacatggcaaaactacatctctaccaaaaatacaaaaattagctgggtgtggtggcgcgtgcctgtaatcccagcactttgggaagccaaggcaggtggatcacctgaggtcaggagtttgagaacagcctaggcaacatggcaaaaccctgtctctactaaaaatacaaaaattagctgggcgtgttggcacacgcctgtagtcccagctacttgggaggctgaggcaggagaattgcttgaacctgggaggcagaggttgcagtaaaccgagacagtgccactgcactccagcctgggtgacagagtgaaactccgtctcaaaataaataaataaataaattagctgggcatggtggtgcacgtctgtaatcctagctactcaggaggctgaggtggaagaattgctggaatctgggaggcggaggttgcagtgagctgcgatcacaccactgcactccagcttgggcaacagagtgaaactctgtctcaaaaaaaaaaagtggttaaatatatgtaacataaaggttgccattttaaccatttccaagtgtacagttctgtggcattaagtacattcacaccgtttgcgaccatcaccgccacgtcacggtcagtttatgttatcttgattaggtgccagtccccagggactcaaacatgaggcaaagtgttgctgtgaaggtgttttgtgcgtgcgattaacatctacaatccgtccaccttgagtaaaggaggtgatcctgaatgacatgggtgggccttgttcaaacagtcaaaggcctgaagagcaaaaatgaggtttcctgagaagaagaaattctgcctcaaaactgcaactccaattccttcctgagttttcagcctgctggctcatctatcaatgttggatttgccagccaccactattgatatcgatatctatatgtatttcttaatatctatatttatatatcttattggctctgttcctccctgcctgtcacacagtctgtctgcttgccagtctctcctatgggaatgtagccccctgaagtcaggaactgtcttttttatagctgtatccagtcagctagtgtggcacacagtaggtgcttaataaaaacatagctactttctaattgctctggcgctcacatggaagtggcttgaacagtagacgcatgggagagagctgttcctggcatcctgatggcctggtgtgcatctcgggtaattcatacagtatcttacgtttgccctctccttattaatgtcacccagccctacctattctaggcagctgcgttcactctggtgaaggggataagttctctgggaaccttcatttgctgagtcagtgtggccacctagggtttctgcttggatgtgttcctgacacatccgccccggtctccagccctgggtggacagctctgcgtaagtgttcccattgctcctaggaattcgctctagtctcagacccaacacattcatccatccatccatccatccatccatccatccatccattcaacaatctgtgttcaatgcctcttcccatttagcactggggatacagtggtgaacaaaagagatgacaattcctgccctcatggagcttaccttctagtagagaaggcagaccatacacaagataaataaggggactatactgaatgttagagaataacgtgtgttcaggaggaaaagaactgccagaggagaggagggcgtgagatgtgtggaagtcctcatgcattggtcagctcttgttatggtaatgctacataacaaacacccctaagttccagtggcttccacccattctcttgggtctatggtttgcttgggtggttctgcctcaggcattgggttgggttagggccactccatgtgttacccttctgaggttcagacagagggaacagcgtctatgtgggcacagccttctcatggcgcagggctcaaccatgcacgcacattgaatgccttcagccggacatggccaaagttatgtctgctcacactccattgcccaaagcaagtcacaagtcgcaacaagtcagaaggctggggacacacactctgcccatagcgagccatggcagagtcactcacaaggtgggcgctgtggttcgaatgcttctctcaagaagcatgtgttggaaacttattccccaaggccacagtgttgggaggcgggcctaatgggaggtgattcggccctggggtgactaggcgagaggcggggccctcatgaatggatgaatgctataatcgctagaatacgtttgttatcgtgaatctgggctccttacgaaagggtgcgttgggtcccccctctctttgctcttccacctgctgctgcgggatgacacagcaggaagtcccacctgccaacttctcagcctccagaactgggaggaaataaagttctgttctttataaagtgtgtagtctgcggtattctgttatagcagcacaaaatggattacgacagcgggttttcggtacagacctcaaggaaattagtgcaccagccatgcagagaactgcaggaagagctctctgaggtgggaacaggccatgcaaaggccctgaggtaggagggcacatgcgcctcggagaaccccaaggggccagcatggtaggagcattgggaacaaggggaggctggggctaggtctgtaaggcactgcgggtcaccgtaaagaatttgacttttcccctgggtaagaagggaaatcaggcaagatgtggagtccaggaggggcctgatgcaatcctcgttttaggaattgccccagctgctgggtggagaatagacttggaggcaaagccataaatgggaacccagggaggcacgaacggcaaccatccaggcagaggacagtgctgtcttggatcgaggtggtggggtggtgaggaatgggtaaagtctggacagtttttgcaggtagaggtgacagaatttgctgataaatcagggatggggcgtgtctcagtccgcttgggctgccgtacaagataccacagactgagtgatttaaataacagaaatttattatctcagttctagaggctggaagtctgagatgaaagtgtcagaagggctggctcttcctgaggcctctctctgtggtttgcggacagccaccttctccctgtgtcctcacagggcctttcctctgggcacacacatccctggtgtctctttctcttttcttataaggacgccagtcctattggattagagccccctgcttatgacctaatgtaatgttgattacctcctcctatctccaaatacagtcacactggggttagggctgtagtaactcttgcctgtaatcccagctactagggaggcccaggcacgaggatcacttcagcccaggagttcaagtctagcctgggcaacatagtgagaggccgtttcctaaaaaaaaaaaaagggttttttcgtttttgtttttgtttttttttttttttcgagaaggagtcttgctctgttgcccaggctggagtgcagtttctcaatctcggctcactgcaacttccgcctcctggggttcaagcgatcctcttgcctcagcctcctgagtagctgggattacaggtgccggccaccacacccggctaatttttgtgtttttagtggagacagggtttcgccatgttggccgggctggtctcaaactcctgacctcatgtgatccacccgcctcggccttccaaagtgctgggattacaagtgtaagccactgcgcccggccaagagtgaagttctgatagctggggtaagaaaggccgtgggaacagccggtttcagacacgctgggtctaagacgctgcgtctggcgctgctcggcatccaatgggagccgtggagaagccaggcgagtgcgtagggcggagccagcgcacaggaaataggacgtgatgaggtcaaccggctggtccaagtgtggacggaagtagaggatgcaagcaccgagccccggggcccccagcattggcggggaggagctcgcggtgcgggagaagcaggggaccgcgcatcctggagaccaggtggagccagtgcgcccggaaggggcgtggcccgctgacagccgcccaggaggccgggggaggcctggagccgagggccgcgcgtggcaatgtggagagacattttggtggagtcatggggccacagcctgattggtgagaacaggaagggaaattgcagatgggcctgggccccctggctcccgcatactccaggaccagggctgagtcatcgttcaccgtgtgtgaccagggccccgtgtggccggctgtcactcggtatccagttaccctgggcagaccactggcggcaccccccagccagaggccgcagcaacacacacgcctgcaggcgaccaggccggactgcatgccccgtgggggaactgagggcgtttcagtaacagagtgttaggggacacgggttgggtggcttggaaagggcctaaggtggggtttgttttagattggggtggtgagggcgcaggggcccggtaggattctctaacagggcagcagccactcatttagcaacaggagaggcgtccagcgtttcgtgggctgtgcggtgaccttgcttttgtgcttagacacgattacgggtggccttgcttcatctccttctgccatggtctcgtggcccctgtctcagctggcgttccgggaggttgtttacgtccaggaggaaagcaaaagcctggccctgagcatcagggtggctctggacgccagggctgtactgtgttctttctcgacacgaatgagtttctggacagttttcccggctagtgcagacccacactgactgaaaaccgaaatctttgcacatgagaaaaataactcccatggcaaggcgtggcggctcacacctgtaatctcagtgctttgggaggccaaggcaggaagatcgcttgaggccaggagttcgaggccagcctgggcaacataaggataccctgtctgtacaaaaataacagattaaaaaaaaaaaacaaaataacacccatggtgcagccatttcttggggggttatggtaattttagtagcaatcatctaagaagaggttttgtttcctcaacccgaatgcgctccctttcctcaaggctctgagagcagcaggaaggctcaccttccttgtttagtgaggtgttaaccttcctgggttcaccccggtgcaacggtttgtgtcatgcatcaacttggctgggccacggcgcccggtttggtcaaacgcccatctggatgttgtcgtggacagctgtgtagatgtgattcgtatttaggtcagtagacttttaaagctggtgaccttccgtcgtgtgggtgggtcttgtccggtcagccagaggccttaagttcaaagactaagctttcctgaagaagaaggaattgcacctccctcaagactgcaatacagaaaccctgcctgggtatccagcatgccgccctgcagaacttggacttgagacctcagtcagctcttgcctgagtctccagcctgccgcctgccctgcagattttggaagtgacaacccccacaattgcccgagccaatttcttcaaataaatctctttccctccatccatccattcatccttctgtccacctatcctatcggctctgttctgtgggttctgttcctctgggaaccctgacagatgcccctggtttggtgggtgtcatggtctctggtgctggtgctacaccctgttgctgccctggccagaagcctgcaggtgcctctgagcccacggaagctaagggggccgtttccaaggggccgcattccccgcctctctgctcttggggcttcggtccattcggcccgcgtgagagctaggagtgccacagtcgacatcctcagtgggattggtaccagttgcctacaccagcaaccctctcatggaggagccttcggtggctttgctccttaccccacctcctgccccctcactcactcctgcttcccaggtcaccttccaaaggccccacacctgccttctcctctccatcccccgaggtggggagccaacacccccccagcagcccacctccctgctttcccttggaagcactgctctccaggtgtccacaggcagcaggggttggggggctccttagcgccttcgccttgaccaggcacgtggagtcatggatccagatcctggctctgagagcgcctgcttctgactgcaggcctggccgacccgtgtcattgcccctcgaggcagggcggaacctctgggtggggaaaggtgggccgtgctgctcaggaaccaaaggcaaaccagccttgtcctcacgcccagagctgtgtccagcctcctcggcgagcctgggttgattccaggagagactaagcacccactgtgtcccacgccttcagccacgtcgcccgtcacctgcggcctgagtgttcccttccagagggcgtgaaaaacaattgtctgctgagaggtctttgaaggggaaacaagtgcccggggcaggccaggaccgcagactggatcttgaggactggcagcgcagtgttttgtgcagaaaagctaagggagatgttacgtgctcagaccacacgaagcgggcagcatcgtggcgggcttagcccgggcactgcctctcgaagcttccaggagcttcctgtaactttccggatggtgccgcagctgcttccccggcacccgggtcgccggggttctgactgcagagggtttctgtgcggggtgcggggtccactcaggtgaagcactcaggacacccctggtgtggtgacagcagcagcgtcactgtcacgggtgatgcggcaacagctcctctccctcctccagcactggcctaggaactgttcattcttctgaacacagcgaatgcccagggcttgagccccccttgcctgcctccagtcatttctgggtcaggtgggctaagaacaaacacacagtgagtgtcgagtcttgcccggtgactgactgcagaagcctctgtgtggcttcgctcccggatgtctgaaggcccctccctgggctgcacggcggctcctgcggggcactgcgggaagagccccagctctccagctaaacctgtgggatgcggccatggtgagaaaaggaaacgaccatcttcacgctgacactgagcaaagaaaagataaaactcatagcaaatttaccatgttagatttacaaacgttagcagtggaataaatccagaggaaagaacaaaagaaagattcgagaccagcctggccagcagggtgaaaccccatctttactaaaaatacaaaaagtagccgggcatggtggcgagcacctgcaatcccagctactcaggaggctgagccaggagaattgcttgaacccgggaggtggaggttgcagtgagctgagattgtatcactgcactccagcctgggtgacagagggagactccatgtcaaaaaaaaaaaaagaagatatgagtagaaatgaatgaaataaaaaacgacatactgtagagaggatcaacgaagccaaaatctaataaaattgataaaccgccccaattaatcacgaaagaggtggagacaaataaacaagagggatgagaaaaaaaaaaacaaaatgcccaccacgctcgtgaggccggagatcaccgaggaatccgagcacccgggggacgctgcatgcccgtgagtgtgatacctacacaaaggaggattttctaaaaaccagaagtcctatggccattaaaaaatggaatcagtaggaaaaaaaaaagccccaaagagaaagtaacattcctagatgttaactggtgagtttctaccaacaagtaagaacagtttcagttttatagaaattctcccaaagaaaagaaaattagaaaacatgcttccctcacctcccgttttatttgtttatttttatttgagacagggtctggttctgttgcccaggctggagtgcagtggtgcaatctctgctcactgtaacctctgcctgctgggctcaagtcatcgtcccacctcggcctcctgagtagctgggattacaggtgcgtgccatcacatccatctaatttttgtatttttttgtaaaggcagggttttgccatgttgccttggctggtctcaagcttctgagctcaagccatccaccctcctcagcctcccaaagcactgggattacaggggtgagccgctgcgcccagcccaccccccgttttataaggtggttataacgttggtatcaaaaccggataagcacaatacaagagagagctacaggccagctgcattcagagcacaggtggaaaatcctaaacgtaacagagctgaacccatcgtcccatctagcgctcctgggaggcaagcctgggctggggtgcccccacccatcctggtgagagcctcgggctgagctgccttgatcccaagggttctgcttccccatggttccccgaagggcccagaaagacacgtcagaaagttggggacggggtgagggaggccatcatcctttggagcagatttggccacctggagatgagaagagccagttctgcaaagtaccctccctcccttcctcacctccctttcacttccctggggtggtacctcccaacaaaacatctgcacctagacgctccccaggccccctcttcttggaaacctgggctaagacagtaactaagctgggttggttccaatcatgtgagattggtttagcattagacaactgattcataaagttctttgtattaacatatcaaaagaggaaaagacgtatgaccttttcaggaacgcagaagcaatttcagaaaaaatgatacctacgtaacaaccagagcagtgagcagattctttttaggtcatgatgcaaacacatcaactgtaaaagaacatatttgagacaatcagggttatctgatgagggactaggttttagatgacatcgagaaattgttaggaatcctgtcaaacgtgagagggaatttgcgcttatagaaagaaatgttcgatttgtaggagaggtacctgaagtgcgcgggggtgaaatgacgtggcgtctgtgctttgctttaaaatactccagtaaagaaaaaaaccaagagaagcgggaagcagggcaaaatcctcctaattgttggatctggctgaggagtatgtgaagggctcattgttccatggtctctacttttgagactgtgtaaaaattttcatgataaaaataaactcaatgaagtagcatttgccgccaccgtaaaagtaataccccgtgatgggcgcaccaggtgctggcccgcagggggagggcgggacgtcactggctctgtccccgtcacccatgacctgcacgtcctggcagtggtgagcgcccagtgtgtgctgtgggacagaattatctctaaacccccgaaagaggatcctctccccaacttaactccagcctcggagggcctcgggggtctatggcacactctccctgctggctttgttctggaaagggctggcgggacatgaccggccccacgttgcactctgagggcagctcgggggtctgcaggggaccatcctgtgtaacctgctgacctcgaggagaagcagggcgagggcttagctcaggcacattccccgctgagccacaacaatgccccatccgccctacacaggcggatttgtgtgtgagccccgcggggccctggagtggaaaattgcagcgccagcctttgtggggcagactgctggcgttacgggaatcctgtagatgaagtgaatgtggcctttgtgtgaggggctggcattgagctcgggtgcagtggggcggcaaatcgctgaggacaggcttaagctgggccgcggaaacaatgccggggagccacggaggagccatcgcagaggccgggaaaaacctcccgacagggctcgatctgtagagatatttgagaaaaatgatctccgagacagtggcttacacacccccacgcatacacaccacggacacacaccacacacatcacacacacaccatacactatagatgtaccacacacacaccccaccacctatacaacacacaccacacacaccacacacacaccatacactatagatgtaccacacatacacaccccacaccacctatacaacacacaccacacacaccacagacacacaccacagatataccacacacacaccagatacacaacatacacatcacacacaccacacagacacacaccacagatactccacactgcacacacatcatacaccacacacacaccacacacacatcacacacatcacacacacatcacacacatcgcacaccacacgcaccacagaaacatcacacaccacacatataccacacaccccacattccacacaccccacacatcacataaacaccacacacacaccactcacatcacacaccacatataccacacacatcacatatacaacacacaccacacacacaccccacacatcacatatacaacacacacagcacataccagacacatcacacacacacacaccacacacactatacacggtacattgtacaccacacaccacacacacatcacacacacgtcacagaaaccccacacaccacacatataccacacacacacaccacacacgtcacagacacaccacacacaccacacccatcacagaaaccccacacaccacacgtataccacacacacaccacacacgtcacagaaaccccacacaccacacacacatcacacaccacatatccaacacacaccccccacacaccacacatatcaaatatacaccacacccccacacacgctcccagaccagttggagccctgccctcgcaccccagatcccgcacatctgtccctctgttcccttggcctcccaccccttctccaccctcaggagccccatgcagcccacactgggtcctgcccagcccctgggccggaggggatggtccccctgcgccgtccccagcgctgcccaccctgcagaacgtcctcaggcggccgggctccacacctgcgacaggcccgaggccccggctgcaggccccactcggctgcagttcccgtcgaggcagccaatggccttgaggcctctcccaggtgggacggcccctgcgagggctggtgggcacaggggccagccctgccccatggccttgctcagctgtgggaggcgtgccttttctttctctgatctctgtgaaactcttactttttcttccccggggcgggggggtgagggtcgggcctgtggtggcactgcgctgagccaggcatgctgggctggcgtctcccttgctggggcgcagatggcctaggtggggcccgtgtggaagctgcgtccatctgactctgccgcctgtgcggtctctgcatctgtgaggggggacccagcagcagtggcccagggtggggctgggactgagggtcaggccggatggagctgtgcggcggcacctggcccacattctccctgcggccaccaagaccccaggtgggcactggcaccttgggctatgcccaggtccccaccctcagccttctctggaagctgctggctctgtggtgaccccctcccgcacccccttaacccaaggcgggtcctttggggcccactgggtgctctggctgggtctgccctgggctggtcactctcgccagggtctcggtccagggcacaggcaggagtgacggttactctccaggaggccgggagaaccaagagacatccaatgaggaagggctgcccatgcttaaagatgtccagtgaggaagggccacccgtgcccagggacatccagtgaggaagggctgcctgtgcccagggtgatcatgtttgcacagaccccggtgtgcctgcggggctgagctgtttgcctacccccatgccctccccaggtggcaggctacaagaccagccttgttcttgcccttcccagccctggcctgggagtcagacacttgactcgtagccttgacttccgtgccaggctgcctggagaggccagcctcttcccggaggggtccttggggcctactgggcagacctctctctccacggcccttcctgtccctaggcggacctttccctgacccagctcacaccagcctggggcctgtgtgctggggccgggctcctgcaggctgtcccgggcaggcgccagggggccctgtgccactgggcggtggtgtgggaggcacaggaagaagcttacctcacccttcagacatcctggggggtacccttgtttcctatatcatttcaaccttggggtcccagcattgctggcgacgaggccggctgcaggttttggctcagaggcagactgagggcagcgccaaagggctccaggcctcccgaaacagcctcggtctgctcacacttggagggctgtcagaggccactggacgccagcaagaaggttgaggagccccaggccggcggtgcccccaaggtatctgacaccagagtgagtcacagttttgaatattccatcctccataccgcaaaattattttcaggatagttatgtaataatcacggataatcatgattttcttgattcattctttaaagcaattaacagaaaaagaatgcatttcaatgttaaagatattcaaattcagtgacttctttcatgcatgagctaacatctcagcttcagcaccacatctccgttttcgctctggtttcacagtctcacatttgaaacacagaataaaaacaccaagaggtcatgcagaatgacagaactgaaatacttccagctcggtttctttgtgagtgctgttgttgttatgtgaaatttctcgtttaagcacagaaatatgttgaaccacgggctggagatgagaacccctcccccagtgcacctgcacccgcccttcaaagccgctccaagccaatgcaggtggctgcgtctgcagtgtcgggagtggccccatgactggaagttcactggaaaatttccactcagtaaatgtttagaacaagaaataaaactgtgctaatgtgaagattacagaaatatagtctatcctcatgactcatgcattccagatttgggaattccctgtgatgtcagtgtgccagggaccacagactggatggcttaaacaacagacatttgttgtctcacagtcctggagcctggaagtccaagatcgcagggtcggtggggccggttccttcctgtgcttgcagacgggcctcttcttgttgtgccctcatgtggactttcctctgtgtgcatgtgttcttggtgtctctttttggaatttgtccagatttcctcctcttttttttttttttttttaagacagagtgagactctgtcgccaggcaggagtgcagtggtgcaatctcggctcactgcagcctccgttttccgggttcaagtgattctcctgcctcagcctcccgagtagctgggactacaggtgcatgccaccatgcctggctatttttttgtattttagtagagacggggtttcaccatgttgtccaggctggtcttgaactcctgacctcgtgatccacccgccttggcctcccaaagtgttgggattacaggcgtgagccaccgcgcccagctgatttcctcttcttataaggaagccagtcacatgcattagggctcacccaaatgacctccttttaacttaatttcctgagagatcctatctccaaatacagtcacactctgaggtcctggggttagtacttcaacacaggaattttttgggaactcagttcagtccatgacacctacttggtcaaatttatttgtaggctgggcacggtggctcacgcctgtaatcccagcacctctggaggccaaggtgggaggatcgcttgagcctaggagttcaagaccagcctgggcaacatagcaagcaagaccccgtccctacaaaaaaattaccaaaaaaatttatttgtgaccccaaatcaataattgcagagttttcctggtcattcacagatgtgtagagagtgccgagacatttgtctccttacacatattcctgggtgaggttgaacaaggcagcactatgccctcttgtttcagcctcaggcggtcaaccagtatcctttttgaggtctatttagtgccatgatttttgcatttcgtgtgttttgtttgtgattttgctttttaaaacgtccccaagcccagtgctgaagagctgtgtgcttggaggcatttttaagtaagtggattaagcacttcagttaaaatgcagaaattgtccaaacagattaaaaacattatctaattatatgctgtctacaagagacactttagattcaaagacacaaatagtttgaaagtaaaagatttctaaaaatatgccatacaaatggaaacccaaagacagttttggttactgtttggttactcttcagctttgtgcttgggggcattttaaacagcaaaatcacgaacaaaacacacaaaactgcaaaaggtaagcaagctgcagtgcatctcacagaggaaacacgggttagagaagcttccttcgggcagagctacagggctgctggccatgagttcagtgttagtgaatcaatgtttatagattcagtaaagcatcttttttttttttttcttttttggaacagagtctcattctgttgcccagtctgaagtgcagtggcacgatctcagctcactgcaacctccacctcctgggttcaagcgattctcctgcctcagcctcccaagtagctgggattacaggcctgcaccatcacgcctggctaattttagtatttttaatagaaatggggtttcaccattttggctaggctgatcttgaactcctggcctcaggtgatacacccgccttggcctcccaaagtgctgggattacaggcgtgagccaccacgcctggcctcagtaaagcatctgtacacagaaacactcataagacaaatgatgcattgctcagctgatgagaacattggggccagaggctcgcaggaccctaagcctgtgtctcccctgggagccatggttcagcagtccaggcatcactaattcagtgctcacagcagctttatagaacacccctacctctagaaacaactgctatgaatgcagcaattgctagaacttagcccagcaaaaggggattttgtgctgacatgatttgcatggacagtggctgggaatcaggaaaagaacactgacttgtctttggtttcattctggtttttcattttccgcagacatcatatccctcagtgcactggctgtcacctccccctgcccgccacctgcacactgtggctttgaggcagcatcttcaacacaaatttcaggaggagcccaggtccagagcaaaagggtcttgtttccccagaatccaggcgaatggcgcagggctctggcaggcggatgcactgacatcagcgtgcatttacttgtttgttgcttgtctctacccaagagaatatcagctccagaaaagcagggactttgtttaacacagcgttaagagacaggactcgaccagtgtggatcaattaagtgaggatgtttgcacagcaggctccgggccagcgagtgggggttaaggctcctgaaagtagccggctttgagatgtggtgggggtgatcctgaattatccaggtgggctgagagcgtaattgccaggtggatgtgatgggagagacctcaccgcccaccactgcctttgaaggtggaggaggggccacgagccaagaaaggcaggtgccttgagatgccagagaaggcaagaaacagactcccctgagcctccagcaggagccagccctgccagtgtcttgctttaagttgaatgagacacatttcagacttgtggcctccagaactgtgagagaagacgtttgtgttgttttaagccactaagtctgtgattggtacatcagccacaagacactaatacaacacctaaactcggggtttgaaaaggcccctagggccctagagccctccctgcccccggtccaggccttcctgcttctgttgtgcagactcaggcgctggctcactcagaagccccctgcaggcccggccaatcctgtggcagagcctcgacgtcccacggcggcctctgagccgccaggccctacagcgtgtggtgaggggcgcaagaggtgtgagtgcctggaccttgctctgccccgtgtctgaggaccttgccctgccccgtgtctgaggaccttgccccatcctcggcacccagagctgtgcagtccataggaccaggctggtgcccagccccaggttggtgcctcagctgcctcctcagcctgcagtctccactgtttgactgaccatgtgcagggccagctgtgaaggacagcacagctcctccctccctgccaagtgtcaggggcactaaaaacactgccatcaatgttctgatgtttaaatcatgttttgatgcaatgtttaaacaaatcaaaatgggtcgggcgcagtggctcacgcctgtaatcccatcactctgggaggccgaagcgagtggatcaccagagatcaggagttcgagaccagcctggccaacacggcgaaacctcatctctactaaaaatataaaaattagctgggtgtagtggtgtgtgcctgtaatctcagctacttgggaggctgaggcaggagaatcgtttgaacccgggaggcagaggttgcagtgagctgagattgtgccactgcactccagcctgggcgacagagcgagactccatctcaaaaataaataaataaaataaataagtaaatcaaaatgaatgcaaaaaatttgtggtggacaaactgtcaacattttacataaagccaggatgaggacgacggccttctccttttgcttcaagctccagcatggctctgcccagcactgaccgtgctcctggcctggctcgaccctccccagggccaagctccatgctggtttccatcccaaaggactcttcttccccctccctgtgccccgggaataggcagccagcacagtggggccgcccgctgcctcacccagaccctgccactgcttggatgttgacccccagactggaaaggtggctttaaacccccttcccttcttccaagccaagtgacctgggcgtgcggcttaaccttctaagctcccatttcctggtctatgaagcgggaatgatgctgggacctgcttcacagggtggctctgaggacccacaggcagagaggtctggtgtaggctttcgggggaagcacccatcactctcccagcgtttcctatctgcaccttaatttggcaccccagggaatcgctcctctggaattgtaaccttgcagggcaaaagctatcatttcaagattttttgggatcctgtgtccccggacagtgctgtaaatgtaggaggaagggtgctgctcatgggtgctgctcatgatggaggtgccccgtggagcacgcctcggagccccccctttcatccctgatcccatctgggatgtgtcaggtctgatccgcatacactggggcatctgacatttcatggccttctgagcccatgggctggagatgaatttgcaaagcccgggagtgtcctgggtgtgtgttcactccacacgcacgaatctgttagaggctgagtaggaactaggaggccaaagagaaccaggcaacttcccacagcctggaccgtacactagaaaagctagcctgggagagggggcatggcctcttcccaggctggcaggggggatgtgggggaggaccatgctccccagggccagtttaccaaaatatcaaaataccaaaatatcaaaagacttaaaactaggagtgagccaggtgcagtggctcacgcctgtaatcctacactttgagaggccaaggcaggtgggtcacctgaggtcaagagtttgagaccagcctggccaacacggtgaaaccctgtctctactaaaaatacaaaaataataataataataataataataataattagccaggtgtggtggcaggcacctgcagtctcagctactcaggaggctgaggtgggagaattgtttgaacctgggaggcagaggttgcagtgagctgagatcgcgccactatatgatctgggcgccactctgggtgacacagcaagactccatctcaaaaacaaacaaacaaaaccgggagtgcctggacacttagtgagaactggacaggggccatgggtcgaggagcaaaataatcaccaggacttgtggataacaggatcatgtgggtggtgggtccgcatgggtgacagggacgtggggacatgtcgccaccctgacaggagcagcccaactcaacagccacggcaggtcatgccacggaggctcgaggcgttacgtggggatgttacatcaaggcattacatcattacgagatgtaacgctcgaggcgttacatcgaggggacgatggccatggggctgggcgtccagggtgggccgcagagggaagctcaccacgtggtgctctcatctgcccacagcccagcccgtcttcctgttggaggcatgtgacccctggaggacaagcatgaaacgccatagggctcccccaggtgctggaattatggcaccttgcagcttcttctccacgagttttaacaagcatgcgtacttttgtaagtggtgagtgtaacggaggttcacagatgcactccgctttggaaaccagtgcactcttgcccaggcccggtgagactctgaggacgatgtgtctaacctctgtgtctaacgggggtgtgtgctctccctcctctggcgaccatgaggaccaccccggcaggacaaggtgtgcagagaactagcatggtccctggcacgtagcccctgcccagtgactggcagatgagaagctccattgtcgccccaggcgagtatggggcacaggcgcctccttgggttgtctgccctcccgggagccccagggtgcccaggcgggcctcagctgagtccaggcctcggggacagtccgtgcagcccctcctggggctgggggcgggcacttgtcccagccacgtttctgctgactgagcagccttcttcatgagctcacgcctttccagagaaatcccttaatgcctccattctgctggtggcatatatagggagggctcggccttggctccacactgcgctgcccagaggccccgctgactcctgccagcctccaggtccccgtggtaccaaagctgaacatggacgtgaccatccagcacccctggttcaagcgcaccctggggcccttctaccccagccggctgttcgaccagtttttcggcgagggcctttttgagtatgacctgctgcccttcctgtcgtccaccatcagcccctactaccgccagtccctcttccgcaccgtgctggactccggcatctctgaggtaagacgtggcccgtggtgctggcctctcctcgctgctcagagggtggtggcctcggtgggtggagagcgatggactctggtcttgctccgtcaggcaggtggcctcgtcccacttcatccccttgcagaggctgggcgagagcctgtgtccccactgcagccacgtggcagagcttcccctggcactggggagagggtggacaagggagcagcctgaatccacctttgctttcctccatcagctcatgacccatgtgtgctttgtaaggcaccagccacatactggaaaccccaagagcagcccatccaggcatgcgtggtggcgaatgccagctcccgggttcctctggtctcctgagtcccggagacctgggagcaggtgggggtcatagtcctgaaagccagagagcagggcgttcctagcacctcctccaatgagctcggcctgcccacggctagcaaagctcttggcaagtttacttaggtgccctgccaaggctaaaaggacaggcaatggacgcccccccccccacccaaccacaggcctcctctctgagccacgggtgagcggtgcaggttctgctgttctggagggcctgagtcccacccagcacctcataaacagggtcctccccagggctgctgcagtaggcatcaacgccagggtgcaaaatgcctcagggagccaaggctgagccaggggagtgagaaggagcatgtggaagtgcgttttggagaggcagctgcgcaggctgtcagcaggctccggccgcttctatagacagcatgacaccaagggcagtgacctcattccacaggctgagtccagccagccagccaagcatcaccagccagacgattgaccctaacggaccaaccaacccgtaacgacccctcctaccataaccagtagccagccagcccataaccagccaacttatctataaccagccacctgaccatagccaaacaaccagccggcccaccagtagcattcagcccctcagctggccctgagggtttggagacaggtcgagggtcatgcctgtctgtccaggagacagtcacaggcccccgaaagctctgccccacttggtgtgtgggagaagaggccggcaggtgaccgaagcatctctgttctgataaccgggacccgccctgtctctgccaaccccagcagggacggcaccctctgggcagctccacatggcacgtttggatttcaggttcgatccgaccgggacaagttcgtcatcttcctcgatgtgaagcacttctccccggaggacctcaccgtgaaggtgcaggacgactttgtggagatccacggaaagcacaacgagcgccaggtgagcccaggcactgagaggtgggagaggggggcgagttgggcgcgaggacaagggggtcacggcgggcacgaccgggcctgcacacctgcaccatgccttcaaccctgggagagggacgctctccaggggaccccgaatcaggcctggcttttccccaagggaggggccgtgcccacctgagcacagccagcccctcccggtgacagaggtcaccattcccgagctaatgtggctcagggatccaggttagggtcccttcccgggctgcacccagccgtcgccagctccatccctgtcacctggatgccagggtggtcttagaaagaaccccaggaagtgggagtgccccgggtggccgcctcctagccagtgtacatcttcacatgaaccctacctgaggaagccagtccccgacggcatagctgcatccgcttggaatgctttacaggcattgacaccttcgcctcacagcagcactttggaaccagtgtcctcattattccagggcacggctggggaacaagggggtcctcagcctgctgggtcccacagctagtaccgggcaggtggacgggagcttctccccacagtcaccctgatgccccgctcttgctcggctggaggcctcggatctccgtggtgttgagggagccggggcactggagccctggtgacctgcatctcctggcggagccgggaagagctcatggactgtcacagatggacagtgccccgcgggggctggagagcagagtggggctggaaggtggaactcttagccaaagtcttggtttcttttggccagggtcctctttcaatggctggagaaggtggtgctggggggtgaacgctgacctcctcatgtgctgcccctccctcgcctgggcccggtaaagcccccacgtagccccagccagcctggaacatgcttcctgagctcccagctcttggtctttgcacccagtggaggaggaggtcagcccagggagctgagtctgcggtttagggcgtccaggggacgtggaagcatgtgggtcgtctggccacattaggtagggctgcagagacctgggctagagcagtcctgcggggtctggaaggggaagactggctgaggtgcggggcctggtctggaatgatcctgcgattttggagtgaagccatggagcgggaagagacaaccccccgcggggaatagcccggcaagtggccacgaggccaggctgaggtccagagaagcaggggcatgaatccataaatcccagggggcctggccatgggatgtgctggctgcacccggcccctgtgagagcccccgcaggctggcccccttctgcagtcagtggggctggggcagcttctctggcatggggcgaggcagccgcctgcacagtggcccccctgactgtgcgcccccaccctctccaggacgaccacggctacatttcccgtgagttccaccgccgctaccgcctgccgtccaacgtggaccagtcggccctctcttgctccctgtctgccgatggcatgctgaccttctgtggccccaagatccagactggcctggatgccacccacgccgagcgagccatccccgtgtcgcgggaggagaagcccacctcggctccctcgtcctaagcaggcattgcctcggctggctcccctgcagccctggcccatcatggggggagcaccctgagggcggggtgtctgtcttcctttgcttcccttttttcctttccaccttctcacatggaatgagggtttgagagagcagccaggagagcttagggtctcagggtgtcccagaccccgacaccggccagtggcggaagtgaccgcacctcacactcctttagatagcagcctggctcccctggggtgcaggcgcctcaactctgctgagggtccagaaggagggggtgacctccggccaggtgcctcctgacacacctgcagcctccctccgcggcgggccctgcccacacctcctggggcgcgtgaggcccgtggggccggggcttctgtgcacctgggctctcgcggcctcttctctcagaccgtcttcctccaacccctctatgtagtgccgctcttggggacatgggtcgcccatgagagcgcagcccgcggcaatcaataaacagcaggtgatacaagcaacccgccgtctgctggtgctgtctccatcaggggcgcgaggggcaggagggcggcgccgggagggaggacagcggggtctcctgctcgcgttggacccggtggcctcggaacgatggggtcgcctgcgtcccttccttctcctgagctcaagcgcctccctccacactgggctggaaggagaggttttgggggcagagcctctgatgggaaagggactggggagcacttccgagagctgggggcggggagggacctggaaggggctgcagggaatggagggaggccgggctcctttctctgtccgcgccggcaccggggcgggacgccagccctggcctccttctgcggggccgtccggttctctcggggtctgctgggtcgtcctgttctctcgggggtcctgctgccttcggggctgggctttaagggcactcgtgcttttgaggaggtggaactcggcagcttcccctgggcaacccatcatggccccgagctggaggcggaagctcgctctgtcccctcccgggaccagacactgggcggccatgccagaccccgccacggggagggagactcggcctggggggccctggctgcctgctgcgctcaccgaggggcatccggggggccagagggcacccaaggggaagcagacgccacggcgggtgggccctgccagcgccctcagccaagtaaagcgccctcgaccccggaggccgaaggcaccgggaccctgaggcactgggacccccatggcaccagcaggacgaccacaggggcgcagcctccacccgggagaacacagacactgacaccaacgggttttcaaaaagtcagcaacaggcattagcgtgggcggccatagtgacgcccagtgacatcacgtgccacggacactgaacagcacacacaccacacactccacacacacacaccacacactccacacacaacacactccacacacaccacagacacacacacacccctcaacacaccatgccctttgtctctctttgtattcctctggccaggccgtggtgtgacgggttctgagtcctgggagtggctcccctagactccccccctcctcctccctccagcaggacctgcccggctgttgtgccatcgagtccccatttgtacagaagggggtgccctgtggttggcaacaacatgacccactgtgctttggggctgcggctggatgtttttgaaaatcggggtgtctggggctccctgctcctcctgggtctgtcccggaccagctgagcggacacctttgctctgcacagcctggcagccattgcagggaggcgggcccaccccaacatctggtagctccgggtcccgtcccaccggctgcacagtgaatggagctgtcactcacgcctgcagccttgcttgactgcgggtcctgcctggaccttgttaggggctggaaggtgactccctgaaaattatatggggtcctacccccaaaggctcagaatgggactgtgtttggcggtgggggctttgattaaattgaagtgatgtcactggggtgggccctggcccagtctggccggtgtccttgtaagaagaggagatgaggacacagacctacagagggacaaccccgtgagggcacagggaggagacactgtctgcaagccaaggagagacgccccagaggaaccggccctgctgccccttgaccttggactcccggcctccaggacccggcagaaacgatgtctgccattggagccgcagctgtggcgttgcagctgcgggaaccgacgcattcaggcccaaagacatagcctttggctaggccttggcagggtctgcaaggcccgtgggtggttcaccagatcctcgatcaggctccttggagagtcgcacggagcaccagggccagcccaggcagaacttcccctggctggtgggctgtctgatctcctctgctcccccagttgggtcttccagcagcacaggctcagcaaggacttggagggggtggggggaggggctctcatctcatctggcctccaagacatgcagcgtgacacctcccatctcccctcctggggcctcctgatgccatccttcctcggctctccaatcacaccccacccgggcggttcttaaactcaggggcctggggctgcttcacctctggcctggggtaggctagatacgcctgagagattgtccatacagggctcagagcctggctccatcccaggctggccacagcccctatctcctctcctcccaccttggggcctattctggaacagcctgccttgcaagggccgcccaggtgatttcagtgatttcactgtcaccatggctactgtgaggccaaggtcacacggactccccacaggcaccaagctgacggtcatctgacagcagcctcatcaccaccttgtccagatgagacagaggctcagcagggacttgtgcaaggccccagccagccaatggcaaggcctggagacctaggctcccaccctgaagtcatctcaacgggcccagcctcaggagctgcctgtgctggggcctggggctgctttgcacccaagaccccttcagagtcacaggtgagtggccagattccacccccaccatgcccgccccgccagggcaggaggccacgtggatgtgagctttaatgcagggcgcagctctggccatggtgcccagccactttcctggagtctgagcagctgccaaggctctctggtggctgctcctacccacatggctcccatgggctgctgttggagagcttctgaagccgggaggatgcctgctccccttgcctcctttccaagctcgcctctgcccacccactgctaggcctgggactcacaccagccttctccgtgggtgctgctgccagctttctgccctctgggcctccctctccctcgcctggccttcagagggccgaggctctgatcacctctcccccgcttcccattgtgtggcctggcgtctgaggcccctgtggtctgactgccccactgctccctggtatgcattcaggttgaattcagagagctctgcgtgccagtgtccagccccattcaccagggcacacggccatcgtggaaagatgggattggccagtacttcccaagcctgccaggccgggagaaccacctgcagtgcattgcaaatacagactcctgggccccgctcacacccacttagagtctggaggggcagagtccagggagctgggcttttggtgcctccaggtgagccctatgatcaggtgcaagtgggagatgctgcgggacagcggcgcctcctcaggttggggcagcgggggagagaagtctcactggaagctgcctttccagtcttggggctcagcttctcgatctccagggaggctctccctcatcccactgctggggacgctggactctggagtgaaaatgacccacgctctcctctgctcccgttttcaccttgggcatcattgtcatcatcattatgagcagcagccggaaaagcattaatggagcacctgctgtatgccaggccttgcgcctgctgcgcttgtaacggcaattctcatgcagcctgcacagcagcctgtagcctgtttctattgttagctgaggacacccaggcttagaaatggagtcacctgcctggtgtccccagctggtgagggcttgggccaggtgcaccctgtctgtttgaccccaaagccagggctcagcaccgctgggcagatgattactgcaatgtcacacataatgtgaaaattgggaggcgctgaggaagcctgaggcactggtccctttcttctggtgacatgctgggtgactttggacagatctatcaacccctctgagtattcgatgtccgtctttgccagtcggctgaagctgggagaccgagtgcctgcggggagcctccagcccccagttcctttcaatcatcaccagcgtgcctcacacttaccaccaggtggcagcagaggacttgcctggccgccgagaccttggccgcaggagacttgccgaacctcagccttaaaggtcaccttcactcttcaagacagtgggaagcggccgcagcaaacatccgcagagggcctggctccgggagcctctggactgcgtgctgccaagctgtgggagacccaccctgacccccggggagctagtgtccagcaggggagactgagatgggaagacacaaaagccgtgctggaagccagcggtgtttctttaccatgagcagttttggggtttcatttgcttgtgtgtaaaatcacttgaaaaaggaggcgtcactgtctggaaggccagggctgtgctggggtccctgggggctctggcggggtttcctccgcgcagaatgacgtcactccccggcttccggcccaggtcagctcttcctaggaagcctcttgtgaagagcagcccccgtcccgcccacatccgcagaggcctgtgagtggggcagggcggtaagtgtccctggcaggcagcctcagctgacgcggtgttggggtcacagggtcagaggtcctgccagccaaggctgcatgtggctgtctgagaaggggctgagacagagatgcaggcacaggtgccagacagtgccagcttggaaggaggaggcatcaggagagccgaggggttgagggacaaggagctgcttgctgggggcagggcggccttctctctacagggcaggcacctgcctcccgctctgcccttggcctccaggatgggagctgggaaaggagtctcccttcaggggagggacccttggcaggggctagtgaaggctccgtcagcgttagctcccaggctgctggggaggccagaaggccctgctctgtgggatttcctctgagaccctgggctaaggactgagtttgcaggggcaggaaatgtgggcgggctccaaacctgctgtgcaggctgctgccattagaacagaacagaaggaaagatacacatgcatccatgcacacacacacacagtgtgcccatatgcacagaacacacatgcacatagaagcacaatgtttgcacagtgtgcacccatgcacaacacaccatgcacactcgtgcacaacacacaaaacacatgctcacacacctcacacatgtgcgcacaaatgcacaacacaaacacacatgcaacatacaaacacatgtacacacatcacacaatacatgtggacacacacggacacacagaagcacataacacctacgcgtgcacaaatgcccacatgcacacctacacaaacatacactcacacagcccacaggaagacgcacacaccactatcatggccatggccaagctctgggctgttacttcattgcgcggctgccctctgtgtctgatttgtacttgaccgtgagagacccctttccaccctccagcttaggggagccccctcctgtgtgctgctcagcagcctctttgacatctagctgcctgggccctggcattcctcgtgccacctgcagagacgtcagagacggcacgagggaggagcgggtatgagggaggggccgtgtggcagctcaaggacgccccaggggcaccgggaaggaggggcagtgaagagagggggtggctcattattctgcagagctgtctgccccgggagcctgtgagcgctgtgcctttaccttggccaggagtgagagaaatcaatttccaaagcatcctggctggaaaatcttgctttccagagcagtgtgggtctccgagcagggctcccgaaggccctgacgcagaattgcagatggctggctgttgaggggacagggcgccccctggggaagacacgtcagacctagaggactggggtgggaaggcaggacacgccaaatcccatctgccgttcgcaggaacactgagaccccacgatgaccctggcagtggctctctgatggtgataaaaggcagcggctgcccttggaggagctggtggctgacttatttctgacagccggtaatggccaagtgctgggcctttgattgtacggggctgggctgcactccacacaggagctggctcaggggtcctgctggcagctgcagtgctcttacctgctcggtgatgagaaacccaattaagtaagtggcctgcagccatgtggcctgtgccaggagccaagcggggagccccggctctccccctgagcccccttgctcactcttcctgcctgcccctgcctgtggctgtcggaaagggtgtttctgcaatgaaccagctggaatccagcagtgctgtggggaatttcccacggctgctgtgacaaacgaccacaagctggttggcttaaaacaacagaaattcactctgaggcacgaagtccgaaatcaaggtatctgcagggccgtgttccctctggaggctctggggtgaatcttccttacctcctccagcattcccggttgctggaagcctctgagctccagtctctgcctccgccttcccctcccgtctgtgtcctttccccttaaaggacatcagccattgggtttagggtctgctctcatccaggacgatctcaccttgatgcttcactgaattacatctgcaaagattctgtttccaaataaggtcacatgcccaggttctggggtttggaacttagacacatgttttgggggacactgttccacccatgacaagtatggatgacgtccctgagatcctgtgtccttgcatttggggacgcttcacatacgccattgtacacgttcctctcaggaacctctgaggttggcgggactgtttttgatattcattgcgcatgtgtgtccccgtgggtgtgtatgtgtgagaatgtgtgagtgtgggtgtccctgtgagtgggggtgagtgtgagtgtgtgcgtatgaggttccacatacatatgtgagtgtgtccctgtgagtgagtcccctgtgaatgggtgtaagtgagcatgtgtgtgtgagtccctgtgcatgggtatgagcatgtgtgtgtccctgtgtgaatgaatgtgtgtgagtccctgtgtgtaacagcatgtgtgtgtgtgtccctgtgtgtgagtgaatgtgtatgtgtgcatgtgtgagtgtgttacgagtatgggtgtccctgtgaacgtgtgtgagtgggtatgagtgtgaatgtccctgagtggttgtgtgtgtgtgtgtctgtccctgtgtatgtgtgtaagtgtgtctgtccctgtatgtgagtgtgggtatccttgtgagagtgtgtgattggtgtgagtgtgggtgtcctcattagtggtttgtgtgtgtgtccatccctgtgtatgtgtgtgtaagtgcggctgtccctgtgtgtgtgtgtgtgggtgtcctcatgagtggttgtgtgtgtgtgtgtggggggggtctctgggtttgtgtatgggtgtgtgtgagtgggtgtgtgtgtgtccttgtgagtggttgtgagtgcgggtgtccctgtgagtggttttgtgtgtgggtgtgtgtatgactctgtgagggggttatgtgtgtgtgtgggagtgtggctgtccctgtgagtgtgtgagtgtgggtgtccctgtgagtgattgtgtgtagatgtgtgtgtatgagtgtggtgtccctgtgagtgattgtgtgtaggtgtgtgtgtgagtgtgggtgtccctgtgagtgattatgtgtaggtgtgtgtgtgtatgagtgtgggtgtccctgtgtgtgtaggtgtatgtgtgtatgagtgtggtgtccctgtgagtggctgtgtgtgtgagtgtgtttgtatgagtgtgggtgtccctgtgagtggctgtgtgtgtgagtgtgtgtgtatgagtgtgggtgtccctgtgagtgattgtgtgtaggtgtgtgtgtgtatgagtgtggtgtccctgtgagtggctgtgtgtagatgtgtgtgtgtgtgtccctgtgagtgggctgagcccaggtacttggtttctgcagggaacttacccacgtttgtgggcccctggtggcaaatgtccagtgtcagccagggcaggccgtggttggaactggataggagactttgtattttggggctgcccatggcgggtccccgtcctcatcagaggcatcccaggggtgacctttcatctgctggagctgctgccactccatgctgtgactcctgatatgcatccactcccgtgttagcccaggtctggacgtgcacagtggccagggtgaggggttctgtccagaataccctcggggaagggggtctcagggaccatcttctttggcaggtgggcagagcagtgggaagcctgggttctgggtgggggcacggcaggcaggctcttctggcagctgggtgatgcccgtgagcgctaaatgcaagacgtgtgaacacaggcggctcacagatgccagtgctgagtgcgactgtgcctccgcctggcctcgaggcatttgctgaacttccagcttacccggttctcctcctgtgctgactccagggcctccttgggccctgctaggcgcgggctgccgccgaggggatgtgggtgggctggcagctgctatcaaggctctgctgctggtcacagctgggcagtggccccagggcccccagacggctcagcacatgtgtaccctggccttgtggccactcaggtgtcccaggcctgagctcatgaagggcagagggcattccctggcacccttgcagttcttcaggggtcctgagtgcgtagtgcccattaagtggcaatgttgatggggacaaccaacacagtccacgagcttgcccctctgtgtgtggaatgggcttgcagcatggtttgtgccagccccgacaggcaggggccctttaaatgagttcccgcgcagcccaccggggcctggctgattgctcaagctgcctgctggagctgcacctgctctaaattgtgatcaggctaaattagatggaaaaatatgcaaatgtagttggagctttttggcaaattagcacgcaagcgggtggagatgaggctcgccggcgagggggagcacccatatcgtttgactaattattgaggcagtcaaattaagacagtgggctcgccaccagggtgggttttaaagggggaattatttcagctacgttttctagttttctgaggctgcctgaaaaagagaagaaaagatacttccctgccagtttctctgctgaataggtgaaagtcagacagctttttcgtgctgagtccacagacgctcctcggtcatctttgatgaacatagactggaatatagaaaccaaaaatattttgagctgggagggagggttgatttgtctaaacctgctggaggtgagtggtcaggccctgaaccgggtcatgcatgctgaagaagcaatcgttggcctccatttgtgtatggcgcgtgcgtggtgatgtcttaaccacaccaattccacctggacgggctgcagttgttaccaattgtgagtgaccataccatagggatgaaccagcagagaagacccagtggtcacatgaggccaggctgagtgcaatgaccaagacaaaggcatgtctaggttacccagtgggagcagtggaagcggcgcttgtcatttggagcgggtcaggagccatcccatgccaccgcggcctctgtagtctcacgacttcctctgcacgcccggggcacttcattcacggcatggatgtggccctcgtgttgctgattctcatagtttttggtgcatccttcttcactccatcagccgcgaggattttgtcttctgccgtcttgtgttttgacttccccttctgccctttctctcaaggtcgccgtttgcacacagcagcatctggagggatgagctcgcctgattccatgcaggtgggttcctgggtggggcattggaggctatctctgaacgactgggtggcaggaaggtacccctggtgcatggaggcctggctgaagcatggccggtctccctgggacaacgtcattatctgtttgccctttgatttcagaatcgaactcagctccgtggttcacacttgtttccagagatgccaacaagctgctcttccccgagtccccgcaggtgtgcacctttgggaaggtatcagatagtgacctcctgggctgggctgtgcctgtgtgcacctgtcacgagcagggctgtgggggtggagatgttaaccatctcaccagaggagggctggactggatccaagaaacttttttccccctgggatggaatttgaaagtggaaaaaaagtcacataaaaatcagtgtagctaattaacaagaatacatggaacagtctccgtcgttttccaagtctgctatgctgcggcacataagtagaggttgaaacaacaatggcaacagcggtgagaaaggatacggggcctgctgagatctgcatcctgtccttaagggcctgatggttttgaattgtcctccaaggccactgccgtggttggagaggccgacgtgtcatcagcacagctaaaacagacaactcgggaaatatgggaacctgggggagactggagcccaagtcgctgcaaatccttgatgaggagacacaagaaaccactacttcaaagctggaggcagcttctgcacagaacagattcatgtttgcatttggggatgactgtctgctcactctgggacgtccatggttctgcacatgtgtagccgggggacatgtttctgttcttggaagacctggaagatttatattgttttatttttttttaattctttttgaggcagagtctcactctgtcgcccaggctggagtacagtggtgcaatctcagctcactgcaaccttcacctcccaggttcaagcgattctcttgtctcagactcttgagtagctgggactacaggtgcacgccaccatgcctggctgatgttttgtgtttttattagagacagggattcaccatattggtcaggccggtttcgaactcttgacctcaggtgatccacctgcctcggcctcccaaattgctgggattacaggtgtgagccactgcccctggctggaagcctttagtggtgtaaactgtgggtgggttttagcagatccgtgtctccgtgggttatgttttctccgtgtctccgtgggttatgttttctttacatcagatatttctttcctcactacctggaagaggtacccgttctttccaagcatgggttaatgagaaggaagcaacaaaaggctgggagagaacacatggagggaagctgccgttggtctcgaagctgtgccatggcgggtaccgtctcccctctgatgaatttataaccccctatgtgctaccatttcaggttaaaccaacttgaccaaggacttccagtttcttggaaaatgatagttttgctaaccttcctgctgattataaactctggacaaaatagaaacaaccattatttgaaggcattggaaagtgacataaagcatgaaaaaaaaaaaaaactcaagctaaagaggtatgacccttgcaaaaaagggagccatgcttatctgggttttgttctcagatccttcttcagaccgccccatatggaatggagctgaagtggaacagtagttttgttgggctgagaggtcagaggccagagttcaaggctgccaaaaaacaacaacaaaaaaagggagccacagagaggggagctcctaaatctagcacaaatttccctgaaacccttggctgataactaaagtttgcatgtgcaagccaagactccagaaagcccagaaagcaggaacagctggaggctgagagctgggcagacatttcagcatctggctagtcccggaaagaccaagtttggagttcatgtgataagcaccttgagcttttcatcagaaaccctgggatagagtaagtttttctatgtgctgaagtaaagtcattgttaattatatagtcagaagacagaaggatactatattcaaactgctgagagaacaatcagtcccctacatacccagctaaactatcactcgagaatgatagcaaaataaagatgtttcagatacacaaaaaccagaagttcaccaacagcatacaaaagatacataccaaaggacttctatttgatggcttttaaagtgatctaaaacattggtcaggtgggatttaaagatgaccaggattttgtgctattctgtagagatatttagactttaagttagcaatgcctgctaaaatttaaaaagatacttttcaaaatagatggaataaaggaattttacaaaacttttaatcaatgcaaagcaagataggagaggagaataaagggatagaatgaggacagaccttggggaatgtgtgaatgctgaatgctggcctttcttgttctgtgttctttttgtttgtttgtttgtgtttttgagacagagtcttgctctatcgcccaagctggagtgcagtggtgtgatctcagctcttctgcctctcaggttcaagcaactctcctgcctcagcctcctgagtagctgggattgcaggcatgtgccaccatgcctggagaattctgtgttcttaatgggggtcaaagggaaagctcacctggctgtggatgggaatgttttgcaaatgtccttgaatatctgcccaaccaatcgtgctccaaagaggtatatttgggcagggaatgaagacctagaggcagatgttggctgtctcttgagtagttgaagcctggacttggagtgggagagccatgctcagggctctctcactgctgtgggtgaggtcactcctggggcaggaggaggctgagcccccatggaaagcaggggttgctcacatcaagttcccttcaagggccccaaactttcagggaggcctggtgcctgttacatccctgggagggatctgagggagggctccatgccctgggatgggacagagaggcaaggcaaggagaaggaggctgacctcgagaggctgagatgcaacctgcaaaagaggacagcagtgcccaagtcaggtgggtggaggggccaccaccccaggggcacgctgtgggctgagccagcctttcctaagggccagggagggcatctgtaaatgcacagacccagatgtgtgagatctgaacaccaaaggcaagatggtctcgcatgcgagggttgtctggaacatctgggaactgggatgtggccgaaaccatcgtttggtccatgctgttccgacgtgagcttcgtgatcatgtccccggcctcctgtctccagctgtggggtagctgcgctgctttgggattgagtctgttctgactgtgggttcagggatgggtgctccctgcagtccgcacctggtgtttccctagatggaggccgactcaggttgggcgatctgtcccgaccgccgagctgcaggaacagtgagtgcagctctgggaagaggcttcccctcccacagagagcgtgggcaaggtgacctttctccctcctggtctgacatggtcatgcacagacctgggctgtggcagcctccaggcaaagcccatgcagggaagatggcagagctggggaaacccctgagaaagggaaccacgtccaaccatctctggatttttctggttttgcaaaagccagttggggttggtctttctgtaacccacagctgaatgtgtctcacttggtcctggtgggactcccgtccaccagagtgacataaccggttgcaggtcacccaacagcaggtgcttgtgatggcttaccctcaggttggctgagggcctggccctgtatagtccagggattctgatagaatgattgcattggatcagccacgtggcggcaggtgattccctgctcagcatccgaaccctctgctacccccgcagggtcctgcggccccactcacaggtgccctgtgaggaggaggtggagcgagaggagaggggactgggcccgacactcactgatcttgaatgcggcccatgggccaggtgtggaggagcaggaggcaggtgtcattgtcacccttccacactcagcagatggactccagaggctgaggcccctgggccagtggcagggtggaattcagcagaggcttctgtttccaaagcaggagccaaccgttctttcaagactgggtctgccccaggcctccataccctgctggtcattacgcagccactctagcaattagacacctgggaatcaggtacccaggactgttttctgtaaagccctattaaaatattcatgagctccatgaattctccccgtgctgggggctcttttcttgtggcctcgggtgcagctggtgctggctctgtgcaggtctctggttttattgactgggttggtccttggcctcatccttccgtggctccattttcctgcccgcccatcccctggccaccgctctgagggctgccgtgggtcctgctgttatgggtcttgtgccacgtgcaccatagctagctgagcagttgaagccccatggatggtgttgggcccagggcttggctccacaggacactcaggccagccctggggtctgctggggctgctgcccaggattcctggcagtgccgatgcggtcagtgcctgggaacctttactgcaagacagtgtgcagatacagtgcaggtctcctagggagtccagacaggcctgaggcggcagctggaggctcctcagcagggactgggccctgagtcacaggctcatgtgctcggctcggagcaggagtcaagaggtttccgcctctgcttagcccctgactcactgaggcctccctggacctcggtttcttcttctgtgacataatggactggggtgggtttggaggatcaaggacacctctgaaaatatgatcagaagacatggactcatttctaggcacacacacatgaacatacaacacaagcatgcatacacagtgcacacatgcatgcctatgggcatacatacatgaacacacacacgcacatgtacaacacacgcacacagtgcacacacatgagcacacacacgaacacatacacacatgtacatacagtgcacacacgagcacacattcatgagcaatagacacatgcacacaacagacatgcacacagtgcacacatgcatgcacatgagcacacacagatacatacatgaatgcacatacatgcatacatgtgctcacatgcaatgcacacacacatgtgtacacacaggcacattcacatacactcagggagtgtgtgggctggggcaagcttgtgcatagatcccaggatcaaaaccttgagatcttttcccagctgtgctcacatcccatgggtggctcatgaaattaattcagtgggtctccaccagcatctttaaagaaggaatagaatagagtagagtggaagtatacattggttcacaacctttacttcagtgctacacacacaggcacacacatgcgatacacactggatcatggtggaaaatttatttcctactgtggcccttggtcattgagtctgaaaacacagagccaggacatcccctgatggggtggccggctgggcaccctcactcctcgccaccctcagacctaagcagtggcctgtggggtggctctcgccacaacttgaggtgggaaacccaacacataggaaagttactttctttttgtttgagacagagccttgctctgtcacccaggctggagagcagtggcgtgatttcggctcactgcaacctccacctcccgggttcaatctattctcctgtctcagccccccgagtagctgggactacaggggcctgccaccatgcccagctaactttttgtatttttaatagagatggggtttcgccatattggtcaggctggtctcgaactcctgacctcaggtgatctgctcgcctcagcctcccaaagtgctgggattacaggtgtgaggaacgttactttcatttcctgatgtttgaggtgtggtctcttctggttccttttttatttgatttgattttctaattcatctacttgagggctgagaacgtctcttctcttcctcttcctcttcccccgcccccaccacccttcttaactcctcttctctcttttctgtgtgcagagacattaggctgatgctctcccggcccccttggtaattgtaccagttggcagccttgcctctgcgtccctgtgggaagcttggctcggccgggagctctttggcgtggcagagctccctcccggcccccaccgggtctgggaggatcttgcattttacagagtgcccatgccaacctcccttggcaagctcgtggtgtttctctgcatttgccaagaaatggagcaaaacccaactcagtttgctgggctcttcggggatacaggaaagaaaaaagaatggctccacaccctttccctgaactttctgtactcattattttcttctgtctgtctattttttgctctaaaatcacagggctttcgttatttgatgtctttcgtgtataaatacacgttgtccccagactactgttttttcaaacgcttttgtgatttaaaacaattttatttttattgtaaaatatatgctacatacagtagagtacatacaatacagatatacattttaaagaatggttagcctgctgagtgcagtggctcacgcccataatcccagcactttgggaggctgaggcaggaggatcacttgaactcaagagttcgagaccagcctgggcaacatggcaaaaccccgtctctacaaaaaatacaaaaattagccaggcatggtggtgcatgcctgtggtcctaactatttgggaggctgaggtggaaggattgcttgagcccaggaggcagaggctgtgagctgtgatcgtcccactgtactccagcctgggcgacaaagtgagaccctatctatctcaaaaaaaaaaaaaaggggaacttcttcccagattaagaaatagaaccttaaccagaaccttagaagtggcctgtgcaccctttgggatcgcatctcattcgttcattcattcattcgttcatgcatgcagcaagtctttattgagtccctgctatgtgctaggctttgtgctaagcatttgggatatagccgcagacgaaacagatcaaaacccctggctgtgtggctctgcatcttaccctgcaggtaagagacattttgactttttgtgatgttcattcctttgctttgtcttagggtttccatgtgggtgggaatgcatccctaaacaacatcatgcttccttttgtggttttggaacttgaggtaaacaaggtgatactgcgtggacccggatgggattgcttctctcccttggtcttgtcttgcatgtgagattcaccccacagctgtgcgtggccatgggccatttgttttcatgcgtctatatagtgttccactgtttatcgacttatccattctgttgctggtgaacatcagggttgcttctgatttttggctattgcagaaaatgctgctgcaagtgttattacacaagtctctgtgggtcctaggggtggaatcgctgtgtcatggggtgtacctgtgctcagctctaccagatcgtggcaaatggttttcccacatggagctctgattgcagtctgcctgagttactgtctactaatttgcatttccctgattattgataaggctacgcatcttttcttttttctcttttgtagagttggaatcttgctatgttgcccaggctagtcttgatctccttgcttcaactgatcctcctggcttggtctcccaaagtgctgggattacaggcatgaaccaccacacctgatcatcttttcgtgagttagtatctttttgtatttcttcttttatgaagtgttttgcccgtgactttcatattttggctttttttttttttgcaggcattttttatatcgatggttctctgctgggatgactttgcctccaagcccctgctggcggggctctcagactgcagcccctgtgaatactcacatgcccagcaattgtcccttaggtgcagatgccatgtgagccccagcccttgcctgtggacgtccatgtcgtgctgttaaccctggtcatccacagtctgaaccctcctctggtcccttcctgatacaggaagtgcactgggctcttagccacaactgcagaaagtggggctggggttcattgcttgtttctggggtcactgccactgtcagtatcatccccctaccctgcaacagctcagcctgcttgggtctaggagctgcagcgctttctatcccttcctcaagacagtgagtgcccacctaggccacactacccaggagccagtgctgccgccacctcgacccaccgtgcccacctcctggaagagggctggcggcatcttggactaaaggtcacgttggcttcctgggaatgctggcacacctgtgggctgccaaggccactcccaaggggctgtgagttttgactgtgctggcacacacacccctcacgtgcacacagtgggtgccccagaaaacatgacagtggcactcctgtcactacccagaccccagggcagggtgcacaaagccttgatttagagatgccacctggaaagccacagccccaatccattcctgtcaatccaaacctattggaaataagacatgggactcagcacttagcagcatcctcatcagaccttctggtaaatggaaggatttttctttaacacatgggttttctgatgtcattttgcttacagtggactgatcagggccactgaaggatgagagagagaatacatggcaggaacaacgatttcaactccaaggagaggtgtgatgtgtgaaggggacaggggcagaaggaacagggtgtcaggtgggagggaggggtgtggccagcacggggagaggaaggggaggactgccagtgcctggagggaggcgacccatttccattagaggggacctcccctacctcctgggctcgatcccataattagcagcaaaggcagctggccagggcacggtgcgccgtacgggtttgaaatggcagcagtgcctcaagcattcttctccgcacctttagtcattagctatttgtttcctccccacaacaattagtgctaatgtgacatgtgctcatttttgtacgggataaaactgccatccagtgcgatttggtacaaatgagtcaaacaagacaggctcaccctgagcctcctcttttctttctcctgctggagacctctctcaccagacactcaggtgtaccagtacagcagctttggacctaagtggactccagcagctccattaacccagagcttgcaccaacccagaatttccaccaagccagagtttccaccaagccagggcttccaccaatctagaacttgcaacaatccagagcttccgccaacccagagcttccgtcaatccagagcttccaccaacccagagcttccaccaacccagagcttccgccaacccagagcttccaccaacccagagcttcctccaatccagagcttgcatcaacccagagcttccgccaacccagagcttccgccaatccagagcttccgccaacccagagcttccgccaatccagagcttccgccaacccagagcttccgccaatccagagcttccatccagagcttctgccaacccagagcttccaccaatccgatcttctgccagcccagaacttccgccaacccagagcttctgccaacccagagcttccaccaatccagatcttctgctagcccagagcttctgccaacccagagcttccgccagccccaagcttctgccaacccagagcgtgcaccaacccagagcttccaccaacccagggcttctgccaatctagagcttctgccaacccagagcttctgcccagagcttccgtcaaaccagagcttccaccaacccagagcttttgccaacccagagcttctgcccagagcttctgccagcccagagcttccatcaacccagagctcgcaccaacctatagcttctgccaacctacagcttccaccaacccagagcttccatcaacccagagcttgcaccaacccagagcttctgccaatgcaaagcttccaccaagctagagcttccaccaaccacgagcttccaccaaccacgagcttccaccaacccacagcttgcagctcagtctccagaaaggggggagctgctctgtgggtggcattcgttccaggtgcgaccctgaggggatggccaggctgggggctgtgcttactttccagagggcaagaggagacaaaccagggcctggggctatacacacatgcacgcgtgtgcgcacacacacacacagaggacacatcacacacacccagacacacacacacacacgcactgcacacatcacacacccagacacacacacacacgcactgcacacattacacacccagagacacacacacacacaggacacatcacacacacccagacacacacacactctgcaaacatcacacacactgcacacatcacacacccagacacacacacacacgcactgcacacatcacacacccagacacacacacacacgcactgcacacatcacacacccagacacacacacacacacgcactgcacacacacacccagacacacacacacgcactgcacacatcacacacccagacacacacacacactgcacacatcacacagataccacacacactgcacacacctcatgacacacacacactcacacaatgccttctccatggccaggggacctggggcctatgcctgtgcccgtgcccctctgtctgggggcctgcctgtaggatggtggcctcctgaggctgggctgcatggcagcgtgtggggccaggtgtctgagctccatcctcctggccgccaccaccacgctgctggtgagctggggcggccagaactcagcaccatggtccgggcgttcagcagcaacttggattcctcattgctctgcggctgggcatcccacagccgggacgggggcttgggcctggcgaggcccctcctggttcccacagggtcctcagagcaggggctggctctgctgtcccttcctcaccttaggagggcacccaccctgcgggctcaggaccactgcacgattgggtcttaccctagcgcttctccacagctccctctccagacacagctccctggggaggaagggctgccagcagggttctggtgacacagccacctgccctgcagctgtggcctctaggccctgctctgcacccctctggctgcttcctggtgtggatcctggggcctctgggcttccccagatgtctcagaatcgaatcagcttccctccctcccagtagcaaacctcagaatgattcagccccaggaacctccggacgctgctgttgcctgggcccatccatccccgccaacaaccctgccaagcctgctccctcctttcccctcccatgagaggagccgtccccgcctggccttccggaagcttgtgggcctcttggatggagcatcctgcctctcagtgttctttccgataaagccccctcgcctatatgctgatttgtttcatttgacacccatcaaagggcatctgggtcccctacccagggctgtcaaagttgacccttctctggaactggctgatttgatcacctgggccacctgaaggagtggggggactgatgtgtgccccgtgcatttagaagcaaggaggaggggacgggaactgctgtttcctagaatggttctgtgatgctggtctgcctgctgcagtggggaaagaggacgttcttgcggaccttgacctccatgccggcagccggaccccggaggtgagagtgactctgctgcaccctggacgcacctcccccctcctcatttctcaggcctcctccaccctttgtgctgtggggagggaaataactagagacatcgtcacattgcatgtgacgggaaggtgacattctggtctcagagcctgaggctgatggcctgtggggaaatttcaggggagcacagagaggaagaaaggagaacggaaacccgtccaggggccccagccggccctttgcaaacagaggcagggtcaggcgaaaccgagggccaggtcgcagatgaaggctggagtctgaggtctggggcctgggatcagcctgttttagctgctgctcgggtgctttctgcggagggggctcatcacactctccacccatgggtgcattcgcatgtggggcactgctcgtggctgagaccagggtttggctccagtgactatttgtaggtggcctttcctctgtgtctgatccccagctcgtggctgctgtgccttagtggtgttccattccttcctcacggcagcagccctctggtctcagcggagagcaggggacatgtccccccaggacgggctcctgcttgctcccgaggggcgccttggcagggcggacattggaagctgaatgcggaggaagcatccggaagcggcgctcttggcctcagccctcctgtcctggggtgagtcaggatctctgctggggagggctctggggagacagctctggaatcctctctgctgggttcatgcagggccaagcctgggtttgaccttcatgcatgaaggaaggaaagcgggtggaacagctgcggacgtggaggcagtggcgacaacggacttgactttaactggaagctcaggaatactgtggtcgtgctgtcaaatctctgttatctccgaaggggcagcggggaggttcccttgtgtcaggacagacgggaggtgtgcgggggaggccgggggaggcgggtgtctggactggggtctgagcagcgcttcagggaggagggggcctagcagggcaggaaatggccagatgttgttctgcagccccgtggataggggtcctggggacaggagaagcccttgacagtgtcaaatagaaaacaaatctggacgtaagtcacgggggaatgtattagaaaggatattgcgagaaagcgtggggcccattgcaccagggagggcatgcccactttcagagcggggagtgcctgagggttggggaagagtgaacagagggagagagactgagcggtgggaggtggggaaggaaggggcgggaaggggccatgaggagagaagatctgatctgaggccctccttttcacagaggggttggctgtgggacgaagccccttcctagctcctggctatctctttaggtgtcttttgagtttcacttgtcactgtgaaatgtctcgttcgtttggtgtttactagttcatttccttttaaacaaaggaatttttccctcgcaggatgctctacaagtcaccagcaggcatgtggagtcactgttggagtcaggcatccactccagtgaactggaggagaagggctagggtcgaggagtataaaacatggtagccaaaggcctggctacttggcagcgtttgtgggcatctttccctagggagggctgtgggcacaggcaaatgtctaacacaattatctttttcttcttctttctttttttttttgagacagagtcttgcttagtcgccaaggctggagtgcagtggtgctatcttggctcactgcaacctctgcctcctgggttgaagcaattctcccacctcagcctcccgagtagcagggattacaggtgtgtgctaccacgcccggctaatatttgtatttatggtacagatggagttttgccatattgcgcaggctggtctcaaactcctggactcaagcgatcctcctgcttcagcttcccaaagtgctgggattacagacgtgagccatggtgcacggcctgcagctgtctttaggtctaatcaaatgttcctgaaatttgactttacaaagatctgctaattcagaagaaagcgctttactcccagaactgtgaagccctgcaatggacagacccaggttactctactcaactgtggcttttccaggaaccgcatccatgggaaatcccaacttcatcccactttagggagagccacacatttgtacattctgcattttactttttgtatttttgaaagaaggagcaaatacggtcacataaagtaacaaaacaacgattgttagaagggctttgcatgaatcccttattgttctgctctgcaacctgacttggcctctattcctggatggccacacccagatttgttccctcttcgtcaagccaagcccaggggctcttgtatatccctgtcagcctcccaggatccggcactggcaggcgcttagcacgtatctgtcacaggtggtttaattatctgtttggaccttctcaagttacaattctaaggagtcccaaggaagtaaagtgattttaaaaacacagaaaacagttttcagaatttctgcagccagccatgaaggagtagctaggatggaacttatgctgtctgtttctgtttttgttttttgccaaaagaactagaaagctggacaaagcagacaaaacaactggctttggacatcaggacaaaaggctgtgcagggctggcatccctaagagataggaaaaaaatgaagtaagttgtgcaatcaactctgttttctggctggaggcagttttcatactgtcaggcagggagggggaatccaagcacaacatggtgatctagctgaattgagaagagtgggctatggggaggcagaggtgagacagggtagcagagaggaggaagatactcaaataaagaaactcaaatacctgcataaggtccctttgagcattcacttaataccaatctgtacatgcgtaggtggaattccaggaagtgaataaagaacagtgaggtgttaagctgaacaattcctagaactcacaccaggctgcaagaaatttgaactccttctattcagttggagacctcatagagcacttggggcaatcaatagacaatacacggctcacgcctgtaatcccagcactttgggaggctgagatgggcggatcacccgatgtcaggagttcgagaccagcgtgaccaacatggagaaacaccgtctctactaaagatacaaaaaattagctgggcgtagtggcgcatgcctgtaatcccagctcctcgggagactgaggcagcagaatcacttgaacctgggaagcggaggttgcagtgaggtgagatcgcgccactgcactccagcctgggcaacaagagtgaaactccgtctcaaaaaaaaaaagaaaaaaaaatagagaatacaaaggatcaagctttagtagtaggaataaattaactctagagtataggcaactctagataaccccaaaaaaatgtaaaagcaagcctcaaaaagatcaacctcatctgcaagtaactttattacttgccagaacaaatgtcaacactatttataaaggaaaaaaaaatctatacgtttatcaatgttatattcaaaatgcctgtcacccaataaaatatggtgagatatgtgaagcaaagattgtgatccataactaggagaaaatatcagtccatcaaatcaggcccaggaatgatgggaatgatagaattagtagataaaagaattttaaatggctattataaatatgctcaagcatgtaacagaaaacatgaatgcaaacggaagagaaaaggaaggtattgaaaaaaaaatgggatgtctagaaatgaaaaataatttttcaactgaaaagttcactagaggggatcaacagcagattaaaaactgcagaaaaaaagatcagtaagcttgaagacagggcaataaaacctgtcaaaacagaagtatatagaggaaaaagactggaaaaaatgaacagagcctcaggaatgttgtctaacatgcttgtaattggaattcaagaacaaaagaagggtgagagagagtagcgagaaaatgcattaggaaaaataatggcccccaaagttgtcaaatttgataaaaagtgtaaacccacaggtccaaaaagtaaaacaaatctcaaacagcgtaaacactaataaaagtatatcaaggtatatcataatcaagttgctgaaaacctatgataaaaagaaaattttaagagtgtctagaggaggagaatccttacattttaggggaacaacaataaggtgactgcaaacttctctttagaaaaacgcaagctggaaggcagtggaatgacatctttaaaatactcagagaaaaagaatctattaaccaaaaattttatatttagcaaacatatctttccaaaatgaaggtgaaatactttttcagatacacacaaaaaattaatatttttactagtgtgcctattcatcaataaatataaaaagaacttcttttaaggtaaaaacggaatcctggaaaacccaatctgaaataagccaggaaaggaaaaataaaagaacaaagaagatgaatcaaatagaaaacaaatatcaagttggtagacttgaacccaactatgttaataattatatcaaatgtaaatggtttaaacattctaattaaaatgcagaaactgtcaggctagattaaaaaagcaagacccaattatatgctaactacaggaaattagctttaaatacaaagacagagaaataaaagtggaaggaggaaaatgatacaccatgcaaacagtaatcacaagagagctggagtggctaacacagtagactgtaggaaaggaataatattaccagagataaagagggacatttcatgatgatgaaaaagcaaattaattcaccaagaagaaataacaaccctcaatttgtatattcccaataataaaccttcaaaatacacaaagaaaataataatagaactgaaaagagaaatagaaatctatacttagagatttcaaaacttctctctcaattattaatagtggacagaaaattcataagaatatggaagacttgaacatgctatcaaccaacttgatctaattgacatttgtgtagaattccaactaacaaaagcaaaatacgtattgtttgcaggtgcgtatagaatttaccaaagtagataatattttgactatcaaacaattctcaaagttaaaaagatttaaatcaggcagaatatattctctgaccacagggaattaaacttccacagtatttcagaagctaagagctataccatttacctgtctatctactttaaggaacagtgataattaatgttcataaaaatgaattgaggtgctgaaaaaatccttataaggcataagacatgccttatatgtatgtcttcagaaaattaaatgtaaaataggtataatgttaatattttatgaaatgtgcaaatgtactcaaaattgagagagtagttcaaagaaacccatccatatacccgccactcaaatttcacaattatcaagaatataggatatttgcttcaccaattcagttgtttattttctctatgcggaaaaattttgaagcagacctccaatactatacgattttactgctgcatattatagtttgcctctgtaaaaactggatattttctcgagtgatcccaattccatggtcacacttactgtaagtcatagtaattttttgtgatcataagatcttggagctgttgcagtaggggggaaacctcagtgcagaactaagctcagctctaaatacagcaaagacagctgggaattcatagccaaagagcaaagcaaaggggtcagtggatggaaaagtactaacaggaacttaattccatgttttattagtttgctagcgccaccaaaataaaatccacaggctggatggacattaaataacagaaatttattctctcacagttttggaggctggaagtccaagatcaaggtgtcatcaggtttggtttcttctgagccctctctccttaactgtcttctccctatgtcctcacatgatcttccctttgtgtgtgcacatgtctgtgtctcctaatttcctcttcttataaagacaccaatcatattggattaggtctcattcatatcacattatactttaataaattattttattttttagttttttatttattgatttttgaaacaaggtcttactctgctgccaaggctagagtgcagtggtgtgattacagctcaccaggctccctggggtcaggtgattctcccacctcagggactacaggcacatgccaccatgcctggctaatttttgtatttttttgtagagatggggttttgccatgttacccagactggtctctgtcttctgggctcaagcaatccaccgacctcagcctcccaatgtgctgaggttacagttgtgagccactatgcccagcccttaataaataatttaaagaatgtatctttagatatagtcacattctgaggtactacaggttaggaatttaacatgtaaattttggggagacacaattcagccataacagacatcaagggtaggaaggttcttgctaaaggcagggcaatgacctagatatcaaaggttggggatgagggatttgaccagataccagagatggagggattctcactaagctgacctaactcgtttcttgctaaaactgggctcatcagcccaagggtgtggagggctaaggttgaggcctagttgagaagggggctcaaagaagactaaagtttggtcaaggagggtgtctttgtcaaaggagacctccccattttcaaccaaatcccctgtttcaactttcaactctctccttcaccccaccttccataatacctgatatatccaatcctgagccattctgggattctgaagtatatcccgaagtagaaactgagtgtctgtgaaaggcaaacacatcttgtctttgtttttttgaaatgacttttgttcctccttgctgaagaacagtttagctgggtataaaaattccaggttggtagtaatttttcttcagcatgttgttacatcactttcaagtcttttggaaagacttggaatattgttcttaatgagtccattggcaggttttttctcctttttaggaaatctgtctttctcctagtagcttttaataattttgtttttttattatcatggatgtttgtttttatttattctgtttggcatttgatgtgccctgagtactcatgtcttcaattctgaaaaattcttagccataacctcttcttacagtgccacactgatatttcctgtattttctaaaattgaaattcctaataagctaatgttaaatcttctctatctggcttcatcttttaacttttctttcatattttccttctgttgacatctgtatattattgtctccatcagtttcttgctaaaaactcccaatttaccagttccctcttctttatgtagtatttatcccacccattgagatttaaaaataatttcatgaccatatttttcatttctaacattttaaaattggttctttcctatattcttctgtccttcaagatttttttttattattttaattttttttgagacacagcctcactctgttgcttaggttggaagttggagtacagtggtgcaatcatagctcactgcagctttgaactctcgtgctcaaacattcctgctgcttcagtctcctaattagctgggactgcaggcacatgccaccatgtccagctaattttcaaatttttttttttttttttttttttttgagacggagtctcgctctttcacccaggctggacttcagtggcgctatctcggctcactgcaagctctgcctcctgggttcacaccattctcctgcctcagactgccgagtagctgggactacaggcgccaaccaccgcgcctggctaattttttgtattttaagtagagacagggtttcaccatgttagccaggatggtctcgatctcctgacctcgtgatccgcccaccttggcctcccaaagtgctgggattacaggcatgagccaccgcacctggccaattttcaaattttttaatagagacaggatcttgctatgtttcccagactgatcttgaactcctgggctgaagtgatcctcctgccttggcctcccaaagtgctgggattacaggtgtgagccactgcacctggcctctattcttctattctttactgatatcctttttggcttgtttgcaactctctgaggattttaaacatatataaggttgtgactcttttggttggtttattgttttaatttctcccatttgttgtgtttatcggctgggtttcctgatgttggtttttctcatgtgttctgaaagtttagtttgtaaattcaccttaattaggtgtttccttttttattttgcttttgcctcttccccactgcttgcccctctgtgtgtgagttttagcaaccaccaatgggttcacaacttagagccaagtcctacctcagcagactggggtttcctccccgggggacctgaagctctgtggctgacctgatcaggtgctggttacatggctatctctgtcccctgaaggtaacagcttcttttagacccccagttacaggcagagaaggctaacacagcccagtcctagccactgccagctccctggcccatgcagcaagctggcctcagcctgaatctagaggcagagccatcagtgcccattgaccaggccagcggagagagtatctcctgctacttctgccttctgaagtcctgagtctatggcttcaacttcagattcctgttgagagtttctgttctttttcaggctccattaacttgcttttgagctcagctctgccttgttaaacataaaaagattcaccatcgataggagttcgcgtggggtggctccagcatgaacttggccagcagttctgccgtgttgtccctcacgcctctgagtggggctcctggctcatattctcacagcaggcctctcccctcaacccctaacagtgcagctttcacatagggccccaccgcctcttgtctaaatgagcatcaccctcttctgcctgcctgcagctgggtgcctggccagcctatgctttgcattgtgaggaggtcaagcccttgttaaagagcatgtgaaggctctcagtggacctcaggataaaaccctgactcctccgcgaggctcagtttctccttgttcaggcccctccagctccagggctttcccagtcctgggcttttccttctgtggcttcccaactccgtgtctgggattaggtggcctgggtatttctactgcaggtttcccacgctgagccacactgtaggatctcctgtcctccgctggaaatgccctggggttgcatctcatgctcctgtaaatgtggccaggaaggagacccagggttctccagggctccagggttctagggtctctggggcttggcacgtgtttatatcattagcgttagaaggcttggtctctcagacagccccaccttcacggttctagctcctcagtcccaccacaaagtgaatcacccttaggcaggggtgggacgggaatggtcatgaatgagggaccctctgcacctgtgactcaaccaagcagggaaacagcttctgtctgaaagggggaaaagatctgaagagctaacgtattgacagaagagccatctcagtgagaagcagaggccgaaaatgaaagtcaatatccacccagagaaaatcaaacgccacacaacctccagcgacttccccgtcaatgcaaacccctttgctgttcatatttcagtaaagggcactcacttcttgggaccctgattcatggatctatttgggcacagtgcctgcccctttgttcataagatccatgtgcaattagaaggaagaaaattcattattcattcagcatggtcctggtatccctgaatcataagaaaaacaattatcactacaaaatagctatatgacactacagggtaatgtcggttgtactcaagacaccttacagtggggaaaatctttccttgcttatatgaaatcgaatcagcggtgatgtgtggaagacgtttgatcaggacctgccagtgggtgacgagggcggcataaggaggactgtggtgggcaccccctcacccaccccttctcagtgtctccccccacagagcaagtgcagggctgcccagggctgggggcactataagagtctgaagtggcttttataaatgagtgattcgattgaagagcaattttaaaatttacctatgtattttggtagaagaatctctatttagagagggagatgacagtggccttcccaggctttgagaggtgagttgaattttctgtctcgataaagagaaagcttttctcttgggttcatatatataaatagccagttgtctaaaacacgtataaaaacccaatcttacaaaatgtaaaaaataaaaaaaagccaattgtctttgggttttctaaattttcctgcaagttctgtgtgtggggcggtggcccctaattttagttaaatttgctttgcttttctcagacggcctcccttatactggaacttgcagacttttctgtcggcctctgatctgacctccaaaggaagtggctgaaggggatggtggaggaggccaggacttcagggacccacagccatcacctccctcccctgccccctacacaccaactctctggaaaacagcaggtagaattgttcccactgagtggtcaatgccagaggccacatcaacatgctatctatgagaactttccagatcttagtcaaaagaaatcaaagttctaatgctggagttccaggctccagctgggctgctggtggggaggaaccctgttgttggggacagaacccattcgtgccctcctgggctacccccggaatctagccgtgcataggcttctgcatccaccatccggttctgggcaatgtaaatttcacatgtgcgtgatccaggtgggctccccgtgtgttagcttgttttcacactgctataaagaactgcctgaggccaggcgcagtggctcacacctgtaatcccagcactttgggaggccaaggagggcggatcacgaggtcaagagatcgagaccatcctggccaacatggtgaaaccccatctctactgaaaatataaacattagctgggcgtggtggcgggtgcctgtaatcccagctactcaagaggctgaggcaggagaatggcgtgaacctgggaggcagaggttgcagtgagccaagatcctggcactgcactccagcctgggcgacagagcgagactctgtctcaaacaaacaaagaagcaaacaaacaaacagaactgcccgaggctgggtaatgtaaaaagagaagaggtttaattgactcccagttccacatggctggggaggcctcaggaaactttcaatcatggcggaaggcaaagcgggagcaagtaccgtcttacatggcagcagaagagagagagagcgaggggggaactgccaatcacttttaaaccatcagatcttgtgagaactccctcactgtcctgagaacagcatggggaaaccattcccatgatccaatccccttccaccaggtccctcctccgatacacagggattacagcttgagatcagatttgggtggggacacaaagccaaaccatatcatccaggctgcaggaagggccactgggtggacaacagaggcaatgaccacacgtgcccctctgtggtgtttgaggggactcccccaaggcagactgggtcagctcaagtggattgtgggtggacactcaggtgaccagtttaggcgaccgagctaagggcctttacacctcctccttcttgagccttggactttggtgcccaccttccatggggcagacaaagggtggtgccctgctgggaccggagccctgcctggaagccagagtaaatggcacatccattttggactggtggctgctcttgcaggtgctggagctctttgtcctactggcgcagctctccagcgcctccgtcactctcgccaacaggtttgtcacggtgcaggtgttttcttttcctctcctacaagctgacctagtggagctcgctgggggaggtcaagtgtctttcgtccccgttgcatcacaggacagtctttattattagccaagggagggggtaggtgggggagaagccaatcaagcctttggagggtctgcagctgaatcggcactcagacccccgtggtgtgaaatggggatggggggacgagtgggcgcagccactgggagcattgatggaggtgaagagaggggagcgaagcagctgagcagttccaaaggcgtgttgtgtttctcttttctgcctcttaggccagttagtgggacacggccagtcccttcttccctcacctttcagcgggaaggtgccacctgcccagtgagccgtcgggatgacccagggcaggcactgcagcctctggccaagcaggtgcccaggcagcactggtaatcatatgtttattgttcttttctgcagtagcagtcacccccttctctctctctctctctctctttttttttctgggggacagagtctcgctctgttgccaggctggagtgcagtggcgcaatctcggctcactgaaacctccacctcccaggtttgagcaattctcctgcctcagcctcctgagtagctgggactacaggtgtgcaccaccacactcagctaattttttgtatttttagtagagacagagtttcaccatgatggccaggatggtcttgatctcctgacctcgtgatccgcctgcctcagcctcccaaagtgctgggattacaggcgtgagccactgctcccagccacccccttctcttaaacggttcctctctgacccatgctcccacgcggatccatgaacaagaagggctgggtctgtggctgggatttggggtccttccagaagctgcttttccactcttttggccaaatgttccccttcccctgttgccaaaactgattttatggtctaattagatgagggagacacctctctggagcctaggattgaagcttcaaagctattttcaaggctgacgttggaagatcctggaaacactggccctgttctgggcatcattcatttcccggagacatgaccagcaaatctgttcagatgagacaagtccatgtggcttgagggcagtgggagtggatgctggtgagactgtcctgatggtgtctgtccagggaaaagcaggaggactcctgttgctgagtgcacccagctcgaagctcggggttccccctgcctgggaggaacagggggtcccagctcagcagtggaaagaagctcggggttccctctgcctgggaggaccagggggtcccagctcagcggtggaaagaagctcagggttccctaagcctgggaggaccagggggtcccagttcagctgtggaaaggaaaactggccccgccggatggaggatgtgtgtggggggctgcctggggtcagagaaggggctggggtggtggtcaattgagtgacctggatcagggatgtagagtgggtgggaaagatggggaggagaggtctggttcatgacatttaagaatctttgagagtcttgtcccaagaatgtttcacctgccagatgggtgaaaacctcttctgagaaacaggtgtcttgttttctcaaccagagagtcaataattatcatcttgccataagcatctgggtctcaaactttctgctcttctatccttgacctccaacgatgagcaagattcccatcgaagctgagctgctccttcaggacctgggggtcacccctgggagaactgtcactcatgcccacggctttggatgttgaccagtctggtgtcatgaagtcagacctgagtgtcacgcagagataggcggtgagaagtaagggtaggccctgctgtgactgcaacttaggagtaaatgcgtcacctggaccgacggcaggaagtgcggacagtgggaggcccataggtaaggtctcagatgaccctgggccatcctggccctgctgtttgctatgtggacttagcttcacgcggcctccccatctacggctcaatttcccctccaggagacaggcatcccagcctgcctggtgactctgggcagggaaagcagcagagctacctgcccccggctctgcgggggtgggacgtgtgaatctctggggtgttttgagatgactttttgtgttgttggtgatctgctgttaacatgggagacagagttgacgttttctgtcccagacctgggacgaagctcttgggcgcggacacagcgttcctcagtggctctttgatcgcagccctgcgccccactgtgtagcgttgagaggccacttccaccagcctctgtccagctccacttgtgaccaggtgcaagaggttcccgagccagcatcctgaacgacattttgtcccatgtttagagtcgaatcctgtgatgtctttgggtaaacattactgggcccatttcaaggattgtgaaaccgacgggaaaggagagacctctgcgtccaggtggtggagaacaaggacaagggcccatggctccaaactccggtccggggcccttcccgtcccagcacgctggcgaggggcaggaccacggaccacaggcttattttattttatttttttctttgtctggaacactctgaatctgatatttaaaaattgatcatgattcatagccagagatgggggctaactgtctcctagcttccccagcgtttctgaagaaatccattaagactgtccagagggacaatggcaggatctgttagcatcccccaccatgtccccttggaccttccctctgtgccaggccaccgcggccagcctcctggtcattttgtcccagcatctggaaagtgctcagcgtctgtggctgccctccggccggtggggtagctgcagtgtgggacagtgttgcctggcagggattggccccgtacctgtggtggcagcctgcttggctacacagggctgctgggggccccacttccctgtctcagttctcaatcccctgccggggggcctggagtcacaccccgtgtctaggagtgtcctcacctgcttgtcctgggctgctgctgcgtcccatggagcagtggcacaacacacgcctttgtaagaagatggcaaatgcctgatcgtccctctcagcagtgtggctggtgtcagggcaatgggcatgggacccagctgtggctcaggtctggcctcacgtgctcctgcccctgggccagcacccggctgtctgggctgcggttctgagtctgtcagtgggataaggatgtgcacctcgtccgggaagtgtctgcgcctcctgtggagcacgcactgacttagaacttctccgttgggattgcttttcgtcctgttatcaggccagtgactcagtcctgctccatcttccagaggaggagacagaagcgctacgaggttgagtcactcgtccaagttgacacagtggcctgtctgagtccagagcctgcgccgtggccccacgcagcctctctgcctcccggtgccgtgagtttgcctgggtaaagctggctgcatacgagcctctgtcgtcacgggctcctactttaaggtgccgtcctgtgcggctgccaaagggaacaacgttgtcagaacctcttcccccggggagtccggagctgcttggtgctggggggctagccagtgaccttgctccctgatcttggcacacacgaggcaaatctgagtcacccacccagtccccaaggtgtcagccccaggacaaatggaaagccagtggtgacctgaggaacaggagcaaggcaggctggaccaggtcagggcatggagagagctggcccaggataggaggggccctccccaggtgtcacaggaggggtgctgtttactatgtggacaactggtgctaattcgttgttcactgtttttgatatacattgcttggaatcaaggcttggcaaaggcctctgagttctggccctgcccctggccaggtctgggagagggaactcttccctctctgagcctgctccatgccagcctgttccccgagccaagagagctgtgggttgtcacacaccgagggtgggcctgggctagtctgctttctgtggccatggaactggagggcccaggcattcacccatctccaggctgttctgaccttggagagtgggcagagatgctgtgcttggggtgtgggcctcccaggaaacgtacgtgttggtgacctgtgcaataggacagcgtggtaactaaaaagaaatgcatttttaatggtgaaattgtggcccactgcccagtgggattcctctgttcactccgggaggcagggtttggctttgcttgcagtgcccagggcccagtctcatggcctgtgactgcctgtctccccccggccgctacccagcgagagctcacacctcatccagctccaggagcacagagtgtggcagctgggcggagtagaggagtagaggtgtggcaggtgtggctccctgtgaccttggataagtcacaagtggcctccaagccttcttgccttgggcttacaatgggatgttcctgccaccaggtggagcggagcccccgagagccggcacagcatttctgcccagctctttagcatacaacctcacccgccactgtgcagcgttcagaggtcactgccgctggcctctgtccagctcacttgtgaccttccctgggatgtgcgagaggagggcgtgagcagggtggcgtgagcagggtggcggccgtgcgtcacctgccaggagttcccggtgggtgctggagcctgcggagcagccctgggcagcaggcagtttgcatggctttttgcgttttttgttcatttgtttttgatagggaaaaagaaaggaaggaagaaagagagggagggaaggagagaggcaagagagagagaggaggggaagaagggaggagtcgggggagagaaaggcatttcagaggggagagaagtccctacaggcaagccaagtcccctaagtgctgtgggaggggcactccttagccgactggctgccaggtctcccgggcagggctcccctcggccaccctcctcccaccttggtgccacgggcagcctgccaatgtcagctggccttggggagctggggaggggctggtgctaccctgggctgctggtggagccctcgtccagagaggatgtgctggtctacccggggggcagccaagtccacagcacagctctgccacgtggcctgtgttacccaaggctagagtagcctcctcaccttggttctgctgttcatccttgccctgatctggcttgggacagtcactgcagggagctgagggaagcccctctctcacctgaggcttcaggccctggagttaagcccctctcaccacagacacactcaccccgtgctgttaggcttccggaagtaagaagggctgtgtgcagggaccacacctgggcttcaatcctgactcctcccaacctctagttgtgtggccttcagaaaattattccctcatccccagcttctgatgagacctgcaatgaccaaactgcagagttgttcagaggatcgaagcaactaataagagggacagtgcccagcagggtggctggcagagaggcactggcaaatgttagtttctgcttttcagctattgagatctccgacagtgatgccataaannnnnnnnnnnnnnnnnnnnnnnnnnnnnnnnnnnnnnnnnnnnnnnnnnnnnnnnnnnnnnnnnnnnnnnnnnnnnnnnnnnnnnnnnnnnnnnnnnnnnnnnnnnnnnnnnnnnnnnnnnnnnnnnnnnnnnnnnnnnnnnnnnnnnnnnnnnnnnnnnnnnnnnnnnnnnnnnnnnnnnnnnnnnnnnnnnnnnnnnnnnnnnnnnnnnnnnnnnnnnnnnnnnnnnnnnnnnnnnnnnnnnnnnnnnnnnnnnnnnnnnnnnnnnnnnnnnnnnnnnnnnnnnnnnnnnnnnnnnnnnnnnnnnnnnnnnnnnnnnnnnnnnnnnnnnnnnnnnnnnnnnnnnnnnnnnnnnnnnnnnnnnnnnnnnnnnnnnnnnnnnnnnnnnnnnnnnnnnnnnnnnnnnnnnnnnnnnnnnnnnnnnnnnnnnnnnnnnnnnnnnnnnnnnnnnnnnnnnnnnnnnnnnnnnnnnnnnnnnnnnnnnnnnnnnnnnnnnnnnnnnnnnnnnnnnnnnnnnnnnnnnnnnnnnnnnnnnnnnnnnnnnnnnnnnnnnnnnnnnnnnnnnnnnnnnnnnnnnnnnnnnnnnnnnnnnnnnnnnnnnnnnnnnnnnnnnnnnnnnnnnnnnnnnnnnnnnnnnnnnnnnnnnnnnnnnnnnnnnnnnnnnnnnnnnnnnnnnnnnnnnnnnnnnnnnnnnnnnnnnnnnnnnnnnnnnnnnnnnnnnnnnnnnnnnnnnnnnnnnnnnnnnnnnnnnnnnnnnnnnnnnnnnnnnnnnnnnnnnnnnnnnnnnnnnnnnnnnnnnnnnnnnnnnnnnnnnnnnnnnnnnnnnnnnnnnnnnnnnnnnnnnnnnnnnnnnnnnnnnnnnnnnnnnnnnnnnnnnnnnnnnnnnnnnnnnnnnnnnnnnnnnnnnnnnnnnnnnnnnnnnnnnnnnnnnnnnnnnnnnnnnnnnnnnnnnnnnnnnnnnnnnnnnnnnnnnnnnnnnnnnnnnnnnnnnnnnnnnnnnnnnnnnnnnnnnnnnnnnnnnnnnnnnnnnnnnnnnnnnnnnnnnnnnnnnnnnnnnnnnnnnnnnnnnnnnnnnnnnnnnnnnnnnnnnnnnnnnnnnnnnnnnnnnnnnnnnnnnnnnnnnnnnnnnnnnnnnnnnnnnnnnnnnnnnnnnnnnnnnnnnnnnnnnnnnnnnnnnnnnnnnnnnnnnnnnnnnnnnnnnnnnnnnnnnnnnnnnnnnnnnnnnnnnnnnnnnnnnnnnnnnnnnnnnnnnnnnnnnnnnnnnnnnnnnnnnnnnnnnnnnnnnnnnnnnnnnnnnnnnnnnnnnnnnnnnnnnnnnnnnnnnnnnnnnnnnnnnnnnnnnnnnnnnnnnnnnnnnnnnnnnnnnnnnnnnnnnnnnnnnnnnnnnnnnnnnnnnnnnnnnnnnnnnnnnnnnnnnnnnnnnnnnnnnnnnnnnnnnnnnnnnnnnnnnnnnnnnnnnnnnnnnnnnnnnnnnnnnnnnnnnnnnnnnnnnnnnnnnnnnnnnnnnnnnnnnnnnnnnnnnnnnnnnnnnnnnnnnnnnnnnnnnnnnnnnnnnnnnnnnnnnnnnnnnnnnnnnnnnnnnnnnnnnnnnnnnnnnnnnnnnnnnnnnnnnnnnnnnnnnnnnnnnnnnnnnnnnnnnnnnnnnnnnnnnnnnnnnnnnnnnnnnnnnnnnnnnnnnnnnnnnnnnnnnnnnnnnnnnnnnnnnnnnnnnnnnnnnnnnnnnnnnnnnnnnnnnnnnnnnnnnnnnnnnnnnnnnnnnnnnnnnnnnnnnnnnnnnnnnnnnnnnnnnnnnnnnnnnnnnnnnnnnnnnnnnnnnnnnnnnnnnnnnnnnnnnnnnnnnnnnnnnnnnnnnnnnnnnnnnnnnnnnnnnnnnnnnnnnnnnnnnnnnnnnnnnnnnnnnnnnnnnnnnnnnnnnnnnnnnnnnnnnnnnnnnnnnnnnnnnnnnnnnnnnnnnnnnnnnnnnnnnnnnnnnnnnnnnnnnnnnnnnnnnnnnnnnnnnnnnnnnnnnnnnnnnnnnnnnnnnnnnnnnnnnnnnnnnnnnnnnnnnnnnnnnnnnnnnnnnnnnnnnnnnnnnnnnnnnnnnnnnnnnnnnnnnnnnnnnnnnnnnnnnnnnnnnnnnnnnnnnnnnnnnnnnnnnnnnnnnnnnnnnnnnnnnnnnnnnnnnnnnnnnnnnnnnnnnnnnnnnnnnnnnnnnnnnnnnnnnnnnnnnnnnnnnnnnnnnnnnnnnnnnnnnnnnnnnnnnnnnnnnnnnnnnnnnnnnnnnnnnnnnnnnnnnnnnnnnnnnnnnnnnnnnnnnnnnnnnnnnnnnnnnnnnnnnnnnnnnnnnnnnnnnnnnnnnnnnnnnnnnnnnnnnnnnnnnnnnnnnnnnnnnnnnnnnnnnnnnnnnnnnnnnnnnnnnnnnnnnnnnnnnnnnnnnnnnnnnnnnnnnnnnnnnnnnnnnnnnnnnnnnnnnnnnnnnnnnnnnnnnnnnnnnnnnnnnnnnnnnnnnnnnnnnnnnnnnnnnnnnnnnnnnnnnnnnnnnnnnnnnnnnnnnnnnnnnnnnnnnnnnnnnnnnnnnnnnnnnnnnnnnnnnnnnnnnnnnnnnnnnnnnnnnnnnnnnnnnnnnnnnnnnnnnnnnnnnnnnnnnnnnnnnnnnnnnnnnnnnnnnnnnnnnnnnnnnnnnnnnnnnnnnnnnnnnnnnnnnnnnnnnnnnnnnnnnnnnnnnnnnnnnnnnnnnnnnnnnnnnnnnnnnnnnnnnnnnnnnnnnnnnnnnnnnnnnnnnnnnnnnnnnnnnnnnnnnnnnnnnnnnnnnnnnnnnnnnnnnnnnnnnnnnnnnnnnnnnnnnnnnnnnnnnnnnnnnnnnnnnnnnnnnnnnnnnnnnnnnnnnnnnnnnnnnnnnnnnnnnnnnnnnnnnnnnnnnnnnnnnnnnnnnnnnnnnnnnnnnnnnnnnnnnnnnnnnnnnnnnnnnnnnnnnnnnnnnnnnnnnnnnnnnnnnnnnnnnnnnnnnnnnnnnnnnnnnnnnnnnnnnnnnnnnnnnnnnnnnnnnnnnnnnnnnnnnnnnnnnnnnnnnnnnnnnnnnnnnnnnnnnnnnnnnnnnnnnnnnnnnnnnnnnnnnnnnnnnnnnnnnnnnnnnnnnnnnnnnnnnnnnnnnnnnnnnnnnnnnnnnnnnnnnnnnnnnnnnnnnnnnnnnnnnnnnnnnnnnnnnnnnnnnnnnnnnnnnnnnnnnnnnnnnnnnnnnnnnnnnnnnnnnnnnnnnnnnnnnnnnnnnnnnnnnnnnnnnnnnnnnnnnnnnnnnnnnnnnnnnnnnnnnnnnnnnnnnnnnnnnnnnnnnnnnnnnnnnnnnnnnnnnnnnnnnnnnnnnnnnnnnnnnnnnnnnnnnnnnnnnnnnnnnnnnnnnnnnnnnnnnnnnnnnnnnnnnnnnnnnnnnnnnnnnnnnnnnnnnnnnnnnnnnnnnnnnnnnnnnnnnnnnnnnnnnnnnnnnnnnnnnnnnnnnnnnnnnnnnnnnnnnnnnnnnnnnnnnnnnnnnnnnnnnnnnnnnnnnnnnnnnnnnnnnnnnnnnnnnnnnnnnnnnnnnnnnnnnnnnnnnnnnnnnnnnnnnnnnnnnnnnnnnnnnnnnnnnnnnnnnnnnnnnnnnnnnnnnnnnnnnnnnnnnnnnnnnnnnnnnnnnnnnnnnnnnnnnnnnnnnnnnnnnnnnnnnnnnnnnnnnnnnnnnnnnnnnnnnnnnnnnnnnnnnnnnnnnnnnnnnnnnnnnnnnnnnnnnnnnnnnnnnnnnnnnnnnnnnnnnnnnnnnnnnnnnnnnnnnnnnnnnnnnnnnnnnnnnnnnnnnnnnnnnnnnnnnnnnnnnnnnnnnnnnnnnnnnnnnnnnnnnnnnnnnnnnnnnnnnnnnnnnnnnnnnnnnnnnnnnnnnnnnnnnnnnnnnnnnnnnnnnnnnnnnnnnnnnnnnnnnnnnnnnnnnnnnnnnnnnnnnnnnnnnnnnnnnnnnnnnnnnnnnnnnnnnnnnnnnnnnnnnnnnnnnnnnnnnnnnnnnnnnnnnnnnnnnnnnnnnnnnnnnnnnnnnnnnnnnnnnnnnnnnnnnnnnnnnnnnnnnnnnnnnnnnnnnnnnnnnnnnnnnnnnnnnnnnnnnnnnnnnnnnnnnnnnnnnnnnnnnnnnnnnnnnnnnnnnnnnnnnnnnnnnnnnnnnnnnnnnnnnnnnnnnnnnnnnnnnnnnnnnnnnnnnnnnnnnnnnnnnnnnnnnnnnnnnnnnnnnnnnnnnnnnnnnnnnnnnnnnnnnnnnnnnnnnnnnnnnnnnnnnnnnnnnnnnnnnnnnnnnnnnnnnnnnnnnnnnnnnnnnnnnnnnnnnnnnnnnnnnnnnnnnnnnnnnnnnnnnnnnnnnnnnnnnnnnnnnnnnnnnnnnnnnnnnnnnnnnnnnnnnnnnnnnnnnnnnnnnnnnnnnnnnnnnnnnnnnnnnnnnnnnnnnnnnnnnnnnnnnnnnnnnnnnnnnnnnnnnnnnnnnnnnnnnnnnnnnnnnnnnnnnnnnnnnnnnnnnnnnnnnnnnnnnnnnnnnnnnnnnnnnnnnnnnnnnnnnnnnnnnnnnnnnnnnnnnnnnnnnnnnnnnnnnnnnnnnnnnnnnnnnnnnnnnnnnnnnnnnnnnnnnnnnnnnnnnnnnnnnnnnnnnnnnnnnnnnnnnnnnnnnnnnnnnnnnnnnnnnnnnnnnnnnnnnnnnnnnnnnnnnnnnnnnnnnnnnnnnnnnnnnnnnnnnnnnnnnnnnnnnnnnnnnnnnnnnnnnnnnnnnnnnnnnnnnnnnnnnnnnnnnnnnnnnnnnnnnnnnnnnnnnnnnnnnnnnnnnnnnnnnnnnnnnnnnnnnnnnnnnnnnnnnnnnnnnnnnnnnnnnnnnnnnnnnnnnnnnnnnnnnnnnnnnnnnnnnnnnnnnnnnnnnnnnnnnnnnnnnnnnnnnnnnnnnnnnnnnnnnnnnnnnnnnnnnnnnnnnnnnnnnnnnnnnnnnnnnnnnnnnnnnnnnnnnnnnnnnnnnnnnnnnnnnnnnnnnnnnnnnnnnnnnnnnnnnnnnnnnnnnnnnnnnnnnnnnnnnnnnnnnnnnnnnnnnnnnnnnnnnnnnnnnnnnnnnnnnnnnnnnnnnnnnnnnnnnnnnnnnnnnnnnnnnnnnnnnnnnnnnnnnnnnnnnnnnnnnnnnnnnnnnnnnnnnnnnnnnnnnnnnnnnnnnnnnnnnnnnnnnnnnnnnnnnnnnnnnnnnnnnnnnnnnnnnnnnnnnnnnnnnnnnnnnnnnnnnnnnnnnnnnnnnnnnnnnnnnnnnnnnnnnnnnnnnnnnnnnnnnnnnnnnnnnnnnnnnnnnnnnnnnnnnnnnnnnnnnnnnnnnnnnnnnnnnnnnnnnnnnnnnnnnnnnnnnnnnnnnnnnnnnnnnnnnnnnnnnnnnnnnnnnnnnnnnnnnnnnnnnnnnnnnnnnnnnnnnnnnnnnnnnnnnnnnnnnnnnnnnnnnnnnnnnnnnnnnnnnnnnnnnnnnnnnnnnnnnnnnnnnnnnnnnnnnnnnnnnnnnnnnnnnnnnnnnnnnnnnnnnnnnnnnnnnnnnnnnnnnnnnnnnnnnnnnnnnnnnnnnnnnnnnnnnnnnnnnnnnnnnnnnnnnnnnnnnnnnnnnnnnnnnnnnnnnnnnnnnnnnnnnnnnnnnnnnnnnnnnnnnnnnnnnnnnnnnnnnnnnnnnnnnnnnnnnnnnnnnnnnnnnnnnnnnnnnnnnnnnnnnnnnnnnnnnnnnnnnnnnnnnnnnnnnnnnnnnnnnnnnnnnnnnnnnnnnnnnnnnnnnnnnnnnnnnnnnnnnnnnnnnnnnnnnnnnnnnnnnnnnnnnnnnnnnnnnnnnnnnnnnnnnnnnnnnnnnnnnnnnnnnnnnnnnnnnnnnnnnnnnnnnnnnnnnnnnnnnnnnnnnnnnnnnnnnnnnnnnnnnnnnnnnnnnnnnnnnnnnnnnnnnnnnnnnnnnnnnnnnnnnnnnnnnnnnnnnnnnnnnnnnnnnnnnnnnnnnnnnnnnnnnnnnnnnnnnnnnnnnnnnnnnnnnnnnnnnnnnnnnnnnnnnnnnnnnnnnnnnnnnnnnnnnnnnnnnnnnnnnnnnnnnnnnnnnnnnnnnnnnnnnnnnnnnnnnnnnnnnnnnnnnnnnnnnnnnnnnnnnnnnnnnnnnnnnnnnnnnnnnnnnnnnnnnnnnnnnnnnnnnnnnnnnnnnnnnnnnnnnnnnnnnnnnnnnnnnnnnnnnnnnnnnnnnnnnnnnnnnnnnnnnnnnnnnnnnnnnnnnnnnnnnnnnnnnnnnnnnnnnnnnnnnnnnnnnnnnnnnnnnnnnnnnnnnnnnnnnnnnnnnnnnnnnnnnnnnnnnnnnnnnnnnnnnnnnnnnnnnnnnnnnnnnnnnnnnnnnnnnnnnnnnnnnnnnnnnnnnnnnnnnnnnnnnnnnnnnnnnnnnnnnnnnnnnnnnnnnnnnnnnnnnnnnnnnnnnnnnnnnnnnnnnnnnnnnnnnnnnnnnnnnnnnnnnnnnnnnnnnnnnnnnnnnnnnnnnnnnnnnnnnnnnnnnnnnnnnnnnnnnnnnnnnnnnnnnnnnnnnnnnnnnnnnnnnnnnnnnnnnnnnnnnnnnnnnnnnnnnnnnnnnnnnnnnnnnnnnnnnnnnnnnnnnnnnnnnnnnnnnnnnnnnnnnnnnnnnnnnnnnnnnnnnnnnnnnnnnnnnnnnnnnnnnnnnnnnnnnnnnnnnnnnnnnnnnnnnnnnnnnnnnnnnnnnnnnnnnnnnnnnnnnnnnnnnnnnnnnnnnnnnnnnnnnnnnnnnnnnnnnnnnnnnnnnnnnnnnnnnnnnnnnnnnnnnnnnnnnnnnnnnnnnnnnnnnnnnnnnnnnnnnnnnnnnnnnnnnnnnnnnnnnnnnnnnnnnnnnnnnnnnnnnnnnnnnnnnnnnnnnnnnnnnnnnnnnnnnnnnnnnnnnnnnnnnnnnnnnnnnnnnnnnnnnnnnnnnnnnnnnnnnnnnnnnnnnnnnnnnnnnnnnnnnnnnnnnnnnnnnnnnnnnnnnnnnnnnnnnnnnnnnnnnnnnnnnnnnnnnnnnnnnnnnnnnnnnnnnnnnnnnnnnnnnnnnnnnnnnnnnnnnnnnnnnnnnnnnnnnnnnnnnnnnnnnnnnnnnnnnnnnnnnnnnnnnnnnnnnnnnnnnnnnnnnnnnnnnnnnnnnnnnnnnnnnnnnnnnnnnnnnnnnnnnnnnnnnnnnnnnnnnnnnnnnnnnnnnnnnnnnnnnnnnnnnnnnnnnnnnnnnnnnnnnnnnnnnnnnnnnnnnnnnnnnnnnnnnnnnnnnnnnnnnnnnnnnnnnnnnnnnnnnnnnnnnnnnnnnnnnnnnnnnnnnnnnnnnnnnnnnnnnnnnnnnnnnnnnnnnnnnnnnnnnnnnnnnnnnnnnnnnnnnnnnnnnnnnnnnnnnnnnnnnnnnnnnnnnnnnnnnnnnnnnnnnnnnnnnnnnnnnnnnnnnnnnnnnnnnnnnnnnnnnnnnnnnnnnnnnnnnnnnnnnnnnnnnnnnnnnnnnnnnnnnnnnnnnnnnnnnnnnnnnnnnnnnnnnnnnnnnnnnnnnnnnnnnnnnnnnnnnnnnnnnnnnnnnnnnnnnnnnnnnnnnnnnnnnnnnnnnnnnnnnnnnnnnnnnnnnnnnnnnnnnnnnnnnnnnnnnnnnnnnnnnnnnnnnnnnnnnnnnnnnnnnnnnnnnnnnnnnnnnnnnnnnnnnnnnnnnnnnnnnnnnnnnnnnnnnnnnnnnnnnnnnnnnnnnnnnnnnnnnnnnnnnnnnnnnnnnnnnnnnnnnnnnnnnnnnnnnnnnnnnnnnnnnnnnnnnnnnnnnnnnnnnnnnnnnnnnnnnnnnnnnnnnnnnnnnnnnnnnnnnnnnnnnnnnnnnnnnnnnnnnnnnnnnnnnnnnnnnnnnnnnnnnnnnnnnnnnnnnnnnnnnnnnnnnnnnnnnnnnnnnnnnnnnnnnnnnnnnnnnnnnnnnnnnnnnnnnnnnnnnnnnnnnnnnnnnnnnnnnnnnnnnnnnnnnnnnnnnnnnnnnnnnnnnnnnnnnnnnnnnnnnnnnnnnnnnnnnnnnnnnnnnnnnnnnnnnnnnnnnnnnnnnnnnnnnnnnnnnnnnnnnnnnnnnnnnnnnnnnnnnnnnnnnnnnnnnnnnnnnnnnnnnnnnnnnnnnnnnnnnnnnnnnnnnnnnnnnnnnnnnnnnnnnnnnnnnnnnnnnnnnnnnnnnnnnnnnnnnnnnnnnnnnnnnnnnnnnnnnnnnnnnnnnnnnnnnnnnnnnnnnnnnnnnnnnnnnnnnnnnnnnnnnnnnnnnnnnnnnnnnnnnnnnnnnnnnnnnnnnnnnnnnnnnnnnnnnnnnnnnnnnnnnnnnnnnnnnnnnnnnnnnnnnnnnnnnnnnnnnnnnnnnnnnnnnnnnnnnnnnnnnnnnnnnnnnnnnnnnnnnnnnnnnnnnnnnnnnnnnnnnnnnnnnnnnnnnnnnnnnnnnnnnnnnnnnnnnnnnnnnnnnnnnnnnnnnnnnnnnnnnnnnnnnnnnnnnnnnnnnnnnnnnnnnnnnnnnnnnnnnnnnnnnnnnnnnnnnnnnnnnnnnnnnnnnnnnnnnnnnnnnnnnnnnnnnnnnnnnnnnnnnnnnnnnnnnnnnnnnnnnnnnnnnnnnnnnnnnnnnnnnnnnnnnnnnnnnnnnnnnnnnnnnnnnnnnnnnnnnnnnnnnnnnnnnnnnnnnnnnnnnnnnnnnnnnnnnnnnnnnnnnnnnnnnnnnnnnnnnnnnnnnnnnnnnnnnnnnnnnnnnnnnnnnnnnnnnnnnnnnnnnnnnnnnnnnnnnnnnnnnnnnnnnnnnnnnnnnnnnnnnnnnnnnnnnnnnnnnnnnnnnnnnnnnnnnnnnnnnnnnnnnnnnnnnnnnnnnnnnnnnnnnnnnnnnnnnnnnnnnnnnnnnnnnnnnnnnnnnnnnnnnnnnnnnnnnnnnnnnnnnnnnnnnnnnnnnnnnnnnnnnnnnnnnnnnnnnnnnnnnnnnnnnnnnnnnnnnnnnnnnnnnnnnnnnnnnnnnnnnnnnnnnnnnnnnnnnnnnnnnnnnnnnnnnnnnnnnnnnnnnnnnnnnnnnnnnnnnnnnnnnnnnnnnnnnnnnnnnnnnnnnnnnnnnnnnnnnnnnnnnnnnnnnnnnnnnnnnnnnnnnnnnnnnnnnnnnnnnnnnnnnnnnnnnnnnnnnnnnnnnnnnnnnnnnnnnnnnnnnnnnnnnnnnnnnnnnnnnnnnnnnnnnnnnnnnnnnnnnnnnnnnnnnnnnnnnnnnnnnnnnnnnnnnnnnnnnnnnnnnnnnnnnnnnnnnnnnnnnnnnnnnnnnnnnnnnnnnnnnnnnnnnnnnnnnnnnnnnnnnnnnnnnnnnnnnnnnnnnnnnnnnnnnnnnnnnnnnnnnnnnnnnnnnnnnnnnnnnnnnnnnnnnnnnnnnnnnnnnnnnnnnnnnnnnnnnnnnnnnnnnnnnnnnnnnnnnnnnnnnnnnnnnnnnnnnnnnnnnnnnnnnnnnnnnnnnnnnnnnnnnnnnnnnnnnnnnnnnnnnnnnnnnnnnnnnnnnnnnnnnnnnnnnnnnnnnnnnnnnnnnnnnnnnnnnnnnnnnnnnnnnnnnnnnnnnnnnnnnnnnnnnnnnnnnnnnnnnnnnnnnnnnnnnnnnnnnnnnnnnnnnnnnnnnnnnnnnnnnnnnnnnnnnnnnnnnnnnnnnnnnnnnnnnnnnnnnnnnnnnnnnnnnnnnnnnnnnnnnnnnnnnnnnnnnnnnnnnnnnnnnnnnnnnnnnnnnnnnnnnnnnnnnnnnnnnnnnnnnnnnnnnnnnnnnnnnnnnnnnnnnnnnnnnnnnnnnnnnnnnnnnnnnnnnnnnnnnnnnnnnnnnnnnnnnnnnnnnnnnnnnnnnnnnnnnnnnnnnnnnnnnnnnnnnnnnnnnnnnnnnnnnnnnnnnnnnnnnnnnnnnnnnnnnnnnnnnnnnnnnnnnnnnnnnnnnnnnnnnnnnnnnnnnnnnnnnnnnnnnnnnnnnnnnnnnnnnnnnnnnnnnnnnnnnnnnnnnnnnnnnnnnnnnnnnnnnnnnnnnnnnnnnnnnnnnnnnnnnnnnnnnnnnnnnnnnnnnnnnnnnnnnnnnnnnnnnnnnnnnnnnnnnnnnnnnnnnnnnnnnnnnnnnnnnnnnnnnnnnnnnnnnnnnnnnnnnnnnnnnnnnnnnnnnnnnnnnnnnnnnnnnnnnnnnnnnnnnnnnnnnnnnnnnnnnnnnnnnnnnnnnnnnnnnnnnnnnnnnnnnnnnnnnnnnnnnnnnnnnnnnnnnnnnnnnnnnnnnnnnnnnnnnnnnnnnnnnnnnnnnnnnnnnnnnnnnnnnnnnnnnnnnnnnnnnnnnnnnnnnnnnnnnnnnnnnnnnnnnnnnnnnnnnnnnnnnnnnnnnnnnnnnnnnnnnnnnnnnnnnnnnnnnnnnnnnnnnnnnnnnnnnnnnnnnnnnnnnnnnnnnnnnnnnnnnnnnnnnnnnnnnnnnnnnnnnnnnnnnnnnnnnnnnnnnnnnnnnnnnnnnnnnnnnnnnnnnnnnnnnnnnnnnnnnnnnnnnnnnnnnnnnnnnnnnnnnnnnnnnnnnnnnnnnnnnnnnnnnnnnnnnnnnnnnnnnnnnnnnnnnnnnnnnnnnnnnnnnnnnnnnnnnnnnnnnnnnnnnnnnnnnnnnnnnnnnnnnnnnnnnnnnnnnnnnnnnnnnnnnnnnnnnnnnnnnnnnnnnnnnnnnnnnnnnnnnnnnnnnnnnnnnnnnnnnnnnnnnnnnnnnnnnnnnnnnnnnnnnnnnnnnnnnnnnnnnnnnnnnnnnnnnnnnnnnnnnnnnnnnnnnnnnnnnnnnnnnnnnnnnnnnnnnnnnnnnnnnnnnnnnnnnnnnnnnnnnnnnnnnnnnnnnnnnnnnnnnnnnnnnnnnnnnnnnnnnnnnnnnnnnnnnnnnnnnnnnnnnnnnnnnnnnnnnnnnnnnnnnnnnnnnnnnnnnnnnnnnnnnnnnnnnnnnnnnnnnnnnnnnnnnnnnnnnnnnnnnnnnnnnnnnnnnnnnnnnnnnnnnnnnnnnnnnnnnnnnnnnnnnnnnnnnnnnnnnnnnnnnnnnnnnnnnnnnnnnnnnnnnnnnnnnnnnnnnnnnnnnnnnnnnnnnnnnnnnnnnnnnnnnnnnnnnnnnnnnnnnnnnnnnnnnnnnnnnnnnnnnnnnnnnnnnnnnnnnnnnnnnnnnnnnnnnnnnnnnnnnnnnnnnnnnnnnnnnnnnnnnnnnnnnnnnnnnnnnnnnnnnnnnnnnnnnnnnnnnnnnnnnnnnnnnnnnnnnnnnnnnnnnnnnnnnnnnnnnnnnnnnnnnnnnnnnnnnnnnnnnnnnnnnnnnnnnnnnnnnnnnnnnnnnnnnnnnnnnnnnnnnnnnnnnnnnnnnnnnnnnnnnnnnnnnnnnnnnnnnnnnnnnnnnnnnnnnnnnnnnnnnnnnnnnnnnnnnnnnnnnnnnnnnnnnnnnnnnnnnnnnnnnnnnnnnnnnnnnnnnnnnnnnnnnnnnnnnnnnnnnnnnnnnnnnnnnnnnnnnnnnnnnnnnnnnnnnnnnnnnnnnnnnnnnnnnnnnnnnnnnnnnnnnnnnnnnnnnnnnnnnnnnnnnnnnnnnnnnnnnnnnnnnnnnnnnnnnnnnnnnnnnnnnnnnnnnnnnnnnnnnnnnnnnnnnnnnnnnnnnnnnnnnnnnnnnnnnnnnnnnnnnnnnnnnnnnnnnnnnnnnnnnnnnnnnnnnnnnnnnnnnnnnnnnnnnnnnnnnnnnnnnnnnnnnnnnnnnnnnnnnnnnnnnnnnnnnnnnnnnnnnnnnnnnnnnnnnnnnnnnnnnnnnnnnnnnnnnnnnnnnnnnnnnnnnnnnnnnnnnnnnnnnnnnnnnnnnnnnnnnnnnnnnnnnnnnnnnnnnnnnnnnnnnnnnnnnnnnnnnnnnnnnnnnnnnnnnnnnnnnnnnnnnnnnnnnnnnnnnnnnnnnnnnnnnnnnnnnnnnnnnnnnnnnnnnnnnnnnnnnnnnnnnnnnnnnnnnnnnnnnnnnnnnnnnnnnnnnnnnnnnnnnnnnnnnnnnnnnnnnnnnnnnnnnnnnnnnnnnnnnnnnnnnnnnnnnnnnnnnnnnnnnnnnnnnnnnnnnnnnnnnnnnnnnnnnnnnnnnnnnnnnnnnnnnnnnnnnnnnnnnnnnnnnnnnnnnnnnnnnnnnnnnnnnnnnnnnnnnnnnnnnnnnnnnnnnnnnnnnnnnnnnnnnnnnnnnnnnnnnnnnnnnnnnnnnnnnnnnnnnnnnnnnnnnnnnnnnnnnnnnnnnnnnnnnnnnnnnnnnnnnnnnnnnnnnnnnnnnnnnnnnnnnnnnnnnnnnnnnnnnnnnnnnnnnnnnnnnnnnnnnnnnnnnnnnnnnnnnnnnnnnnnnnnnnnnnnnnnnnnnnnnnnnnnnnnnnnnnnnnnnnnnnnnnnnnnnnnnnnnnnnnnnnnnnnnnnnnnnnnnnnnnnnnnnnnnnnnnnnnnnnnnnnnnnnnnnnnnnnnnnnnnnnnnnnnnnnnnnnnnnnnnnnnnnnnnnnnnnnnnnnnnnnnnnnnnnnnnnnnnnnnnnnnnnnnnnnnnnnnnnnnnnnnnnnnnnnnnnnnnnnnnnnnnnnnnnnnnnnnnnnnnnnnnnnnnnnnnnnnnnnnnnnnnnnnnnnnnnnnnnnnnnnnnnnnnnnnnnnnnnnnnnnnnnnnnnnnnnnnnnnnnnnnnnnnnnnnnnnnnnnnnnnnnnnnnnnnnnnnnnnnnnnnnnnnnnnnnnnnnnnnnnnnnnnnnnnnnnnnnnnnnnnnnnnnnnnnnnnnnnnnnnnnnnnnnnnnnnnnnnnnnnnnnnnnnnnnnnnnnnnnnnnnnnnnnnnnnnnnnnnnnnnnnnnnnnnnnnnnnnnnnnnnnnnnnnnnnnnnnnnnnnnnnnnnnnnnnnnnnnnnnnnnnnnnnnnnnnnnnnnnnnnnnnnnnnnnnnnnnnnnnnnnnnnnnnnnnnnnnnnnnnnnnnnnnnnnnnnnnnnnnnnnnnnnnnnnnnnnnnnnnnnnnnnnnnnnnnnnnnnnnnnnnnnnnnnnnnnnnnnnnnnnnnnnnnnnnnnnnnnnnnnnnnnnnnnnnnnnnnnnnnnnnnnnnnnnnnnnnnnnnnnnnnnnnnnnnnnnnnnnnnnnnnnnnnnnnnnnnnnnnnnnnnnnnnnnnnnnnnnnnnnnnnnnnnnnnnnnnnnnnnnnnnnnnnnnnnnnnnnnnnnnnnnnnnnnnnnnnnnnnnnnnnnnnnnnnnnnnnnnnnnnnnnnnnnnnnnnnnnnnnnnnnnnnnnnnnnnnnnnnnnnnnnnnnnnnnnnnnnnnnnnnnnnnnnnnnnnnnnnnnnnnnnnnnnnnnnnnnnnnnnnnnnnnnnnnnnnnnnnnnnnnnnnnnnnnnnnnnnnnnnnnnnnnnnnnnnnnnnnnnnnnnnnnnnnnnnnnnnnnnnnnnnnnnnnnnnnnnnnnnnnnnnnnnnnnnnnnnnnnnnnnnnnnnnnnnnnnnnnnnnnnnnnnnnnnnnnnnnnnnnnnnnnnnnnnnnnnnnnnnnnnnnnnnnnnnnnnnnnnnnnnnnnnnnnnnnnnnnnnnnnnnnnnnnnnnnnnnnnnnnnnnnnnnnnnnnnnnnnnnnnnnnnnnnnnnnnnnnnnnnnnnnnnnnnnnnnnnnnnnnnnnnnnnnnnnnnnnnnnnnnnnnnnnnnnnnnnnnnnnnnnnnnnnnnnnnnnnnnnnnnnnnnnnnnnnnnnnnnnnnnnnnnnnnnnnnnnnnnnnnnnnnnnnnnnnnnnnnnnnnnnnnnnnnnnnnnnnnnnnnnnnnnnnnnnnnnnnnnnnnnnnnnnnnnnnnnnnnnnnnnnnnnnnnnnnnnnnnnnnnnnnnnnnnnnnnnnnnnnnnnnnnnnnnnnnnnnnnnnnnnnnnnnnnnnnnnnnnnnnnnnnnnnnnnnnnnnnnnnnnnnnnnnnnnnnnnnnnnnnnnnnnnnnnnnnnnnnnnnnnnnnnnnnnnnnnnnnnnnnnnnnnnnnnnnnnnnnnnnnnnnnnnnnnnnnnnnnnnnnnnnnnnnnnnnnnnnnnnnnnnnnnnnnnnnnnnnnnnnnnnnnnnnnnnnnnnnnnnnnnnnnnnnnnnnnnnnnnnnnnnnnnnnnnnnnnnnnnnnnnnnnnnnnnnnnnnnnnnnnnnnnnnnnnnnnnnnnnnnnnnnnnnnnnnnnnnnnnnnnnnnnnnnnnnnnnnnnnnnnnnnnnnnnnnnnnnnnnnnnnnnnnnnnnnnnnnnnnnnnnnnnnnnnnnnnnnnnnnnnnnnnnnnnnnnnnnnnnnnnnnnnnnnnnnnnnnnnnnnnnnnnnnnnnnnnnnnnnnnnnnnnnnnnnnnnnnnnnnnnnnnnnnnnnnnnnnnnnnnnnnnnnnnnnnnnnnnnnnnnnnnnnnnnnnnnnnnnnnnnnnnnnnnnnnnnnnnnnnnnnnnnnnnnnnnnnnnnnnnnnnnnnnnnnnnnnnnnnnnnnnnnnnnnnnnnnnnnnnnnnnnnnnnnnnnnnnnnnnnnnnnnnnnnnnnnnnnnnnnnnnnnnnnnnnnnnnnnnnnnnnnnnnnnnnnnnnnnnnnnnnnnnnnnnnnnnnnnnnnnnnnnnnnnnnnnnnnnnnnnnnnnnnnnnnnnnnnnnnnnnnnnnnnnnnnnnnnnnnnnnnnnnnnnnnnnnnnnnnnnnnnnnnnnnnnnnnnnnnnnnnnnnnnnnnnnnnnnnnnnnnnnnnnnnnnnnnnnnnnnnnnnnnnnnnnnnnnnnnnnnnnnnnnnnnnnnnnnnnnnnnnnnnnnnnnnnnnnnnnnnnnnnnnnnnnnnnnnnnnnnnnnnnnnnnnnnnnnnnnnnnnnnnnnnnnnnnnnnnnnnnnnnnnnnnnnnnnnnnnnnnnnnnnnnnnnnnnnnnnnnnnnnnnnnnnnnnnnnnnnnnnnnnnnnnnnnnnnnnnnnnnnnnnnnnnnnnnnnnnnnnnnnnnnnnnnnnnnnnnnnnnnnnnnnnnnnnnnnnnnnnnnnnnnnnnnnnnnnnnnnnnnnnnnnnnnnnnnnnnnnnnnnnnnnnnnnnnnnnnnnnnnnnnnnnnnnnnnnnnnnnnnnnnnnnnnnnnnnnnnnnnnnnnnnnnnnnnnnnnnnnnnnnnnnnnnnnnnnnnnnnnnnnnnnnnnnnnnnnnnnnnnnnnnnnnnnnnnnnnnnnnnnnnnnnnnnnnnnnnnnnnnnnnnnnnnnnnnnnnnnnnnnnnnnnnnnnnnnnnnnnnnnnnnnnnnnnnnnnnnnnnnnnnnnnnnnnnnnnnnnnnnnnnnnnnnnnnnnnnnnnnnnnnnnnnnnnnnnnnnnnnnnnnnnnnnnnnnnnnnnnnnnnnnnnnnnnnnnnnnnnnnnnnnnnnnnnnnnnnnnnnnnnnnnnnnnnnnnnnnnnnnnnnnnnnnnnnnnnnnnnnnnnnnnnnnnnnnnnnnnnnnnnnnnnnnnnnnnnnnnnnnnnnnnnnnnnnnnnnnnnnnnnnnnnnnnnnnnnnnnnnnnnnnnnnnnnnnnnnnnnnnnnnnnnnnnnnnnnnnnnnnnnnnnnnnnnnnnnnnnnnnnnnnnnnnnnnnnnnnnnnnnnnnnnnnnnnnnnnnnnnnnnnnnnnnnnnnnnnnnnnnnnnnnnnnnnnnnnnnnnnnnnnnnnnnnnnnnnnnnnnnnnnnnnnnnnnnnnnnnnnnnnnnnnnnnnnnnnnnnnnnnnnnnnnnnnnnnnnnnnnnnnnnnnnnnnnnnnnnnnnnnnnnnnnnnnnnnnnnnnnnnnnnnnnnnnnnnnnnnnnnnnnnnnnnnnnnnnnnnnnnnnnnnnnnnnnnnnnnnnnnnnnnnnnnnnnnnnnnnnnnnnnnnnnnnnnnnnnnnnnnnnnnnnnnnnnnnnnnnnnnnnnnnnnnnnnnnnnnnnnnnnnnnnnnnnnnnnnnnnnnnnnnnnnnnnnnnnnnnnnnnnnnnnnnnnnnnnnnnnnnnnnnnnnnnnnnnnnnnnnnnnnnnnnnnnnnnnnnnnnnnnnnnnnnnnnnnnnnnnnnnnnnnnnnnnnnnnnnnnnnnnnnnnnnnnnnnnnnnnnnnnnnnnnnnnnnnnnnnnnnnnnnnnnnnnnnnnnnnnnnnnnnnnnnnnnnnnnnnnnnnnnnnnnnnnnnnnnnnnnnnnnnnnnnnnnnnnnnnnnnnnnnnnnnnnnnnnnnnnnnnnnnnnnnnnnnnnnnnnnnnnnnnnnnnnnnnnnnnnnnnnnnnnnnnnnnnnnnnnnnnnnnnnnnnnnnnnnnnnnnnnnnnnnnnnnnnnnnnnnnnnnnnnnnnnnnnnnnnnnnnnnnnnnnnnnnnnnnnnnnnnnnnnnnnnnnnnnnnnnnnnnnnnnnnnnnnnnnnnnnnnnnnnnnnnnnnnnnnnnnnnnnnnnnnnnnnnnnnnnnnnnnnnnnnnnnnnnnnnnnnnnnnnnnnnnnnnnnnnnnnnnnnnnnnnnnnnnnnnnnnnnnnnnnnnnnnnnnnnnnnnnnnnnnnnnnnnnnnnnnnnnnnnnnnnnnnnnnnnnnnnnnnnnnnnnnnnnnnnnnnnnnnnnnnnnnnnnnnnnnnnnnnnnnnnnnnnnnnnnnnnnnnnnnnnnnnnnnnnnnnnnnnnnnnnnnnnnnnnnnnnnnnnnnnnnnnnnnnnnnnnnnnnnnnnnnnnnnnnnnnnnnnnnnnnnnnnnnnnnnnnnnnnnnnnnnnnnnnnnnnnnnnnnnnnnnnnnnnnnnnnnnnnnnnnnnnnnnnnnnnnnnnnnnnnnnnnnnnnnnnnnnnnnnnnnnnnnnnnnnnnnnnnnnnnnnnnnnnnnnnnnnnnnnnnnnnnnnnnnnnnnnnnnnnnnnnnnnnnnnnnnnnnnnnnnnnnnnnnnnnnnnnnnnnnnnnnnnnnnnnnnnnnnnnnnnnnnnnnnnnnnnnnnnnnnnnnnnnnnnnnnnnnnnnnnnnnnnnnnnnnnnnnnnnnnnnnnnnnnnnnnnnnnnnnnnnnnnnnnnnnnnnnnnnnnnnnnnnnnnnnnnnnnnnnnnnnnnnnnnnnnnnnnnnnnnnnnnnnnnnnnnnnnnnnnnnnnnnnnnnnnnnnnnnnnnnnnnnnnnnnnnnnnnnnnnnnnnnnnnnnnnnnnnnnnnnnnnnnnnnnnnnnnnnnnnnnnnnnnnnnnnnnnnnnnnnnnnnnnnnnnnnnnnnnnnnnnnnnnnnnnnnnnnnnnnnnnnnnnnnnnnnnnnnnnnnnnnnnnnnnnnnnnnnnnnnnnnnnnnnnnnnnnnnnnnnnnnnnnnnnnnnnnnnnnnnnnnnnnnnnnnnnnnnnnnnnnnnnnnnnnnnnnnnnnnnnnnnnnnnnnnnnnnnnnnnnnnnnnnnnnnnnnnnnnnnnnnnnnnnnnnnnnnnnnnnnnnnnnnnnnnnnnnnnnnnnnnnnnnnnnnnnnnnnnnnnnnnnnnnnnnnnnnnnnnnnnnnnnnnnnnnnnnnnnnnnnnnnnnnnnnnnnnnnnnnnnnnnnnnnnnnnnnnnnnnnnnnnnnnnnnnnnnnnnnnnnnnnnnnnnnnnnnnnnnnnnnnnnnnnnnnnnnnnnnnnnnnnnnnnnnnnnnnnnnnnnnnnnnnnnnnnnnnnnnnnnnnnnnnnnnnnnnnnnnnnnnnnnnnnnnnnnnnnnnnnnnnnnnnnnnnnnnnnnnnnnnnnnnnnnnnnnnnnnnnnnnnnnnnnnnnnnnnnnnnnnnnnnnnnnnnnnnnnnnnnnnnnnnnnnnnnnnnnnnnnnnnnnnnnnnnnnnnnnnnnnnnnnnnnnnnnnnnnnnnnnnnnnnnnnnnnnnnnnnnnnnnnnnnnnnnnnnnnnnnnnnnnnnnnnnnnnnnnnnnnnnnnnnnnnnnnnnnnnnnnnnnnnnnnnnnnnnnnnnnnnnnnnnnnnnnnnnnnnnnnnnnnnnnnnnnnnnnnnnnnnnnnnnnnnnnnnnnnnnnnnnnnnnnnnnnnnnnnnnnnnnnnnnnnnnnnnnnnnnnnnnnnnnnnnnnnnnnnnnnnnnnnnnnnnnnnnnnnnnnnnnnnnnnnnnnnnnnnnnnnnnnnnnnnnnnnnnnnnnnnnnnnnnnnnnnnnnnnnnnnnnnnnnnnnnnnnnnnnnnnnnnnnnnnnnnnnnnnnnnnnnnnnnnnnnnnnnnnnnnnnnnnnnnnnnnnnnnnnnnnnnnnnnnnnnnnnnnnnnnnnnnnnnnnnnnnnnnnnnnnnnnnnnnnnnnnnnnnnnnnnnnnnnnnnnnnnnnnnnnnnnnnnnnnnnnnnnnnnnnnnnnnnnnnnnnnnnnnnnnnnnnnnnnnnnnnnnnnnnnnnnnnnnnnnnnnnnnnnnnnnnnnnnnnnnnnnnnnnnnnnnnnnnnnnnnnnnnnnnnnnnnnnnnnnnnnnnnnnnnnnnnnnnnnnnnnnnnnnnnnnnnnnnnnnnnnnnnnnnnnnnnnnnnnnnnnnnnnnnnnnnnnnnnnnnnnnnnnnnnnnnnnnnnnnnnnnnnnnnnnnnnnnnnnnnnnnnnnnnnnnnnnnnnnnnnnnnnnnnnnnnnnnnnnnnnnnnnnnnnnnnnnnnnnnnnnnnnnnnnnnnnnnnnnnnnnnnnnnnnnnnnnnnnnnnnnnnnnnnnnnnnnnnnnnnnnnnnnnnnnnnnnnnnnnnnnnnnnnnnnnnnnnnnnnnnnnnnnnnnnnnnnnnnnnnnnnnnnnnnnnnnnnnnnnnnnnnnnnnnnnnnnnnnnnnnnnnnnnnnnnnnnnnnnnnnnnnnnnnnnnnnnnnnnnnnnnnnnnnnnnnnnnnnnnnnnnnnnnnnnnnnnnnnnnnnnnnnnnnnnnnnnnnnnnnnnnnnnnnnnnnnnnnnnnnnnnnnnnnnnnnnnnnnnnnnnnnnnnnnnnnnnnnnnnnnnnnnnnnnnnnnnnnnnnnnnnnnnnnnnnnnnnnnnnnnnnnnnnnnnnnnnnnnnnnnnnnnnnnnnnnnnnnnnnnnnnnnnnnnnnnnnnnnnnnnnnnnnnnnnnnnnnnnnnnnnnnnnnnnnnnnnnnnnnnnnnnnnnnnnnnnnnnnnnnnnnnnnnnnnnnnnnnnnnnnnnnnnnnnnnnnnnnnnnnnnnnnnnnnnnnnnnnnnnnnnnnnnnnnnnnnnnnnnnnnnnnnnnnnnnnnnnnnnnnnnnnnnnnnnnnnnnnnnnnnnnnnnnnnnnnnnnnnnnnnnnnnnnnnnnnnnnnnnnnnnnnnnnnnnnnnnnnnnnnnnnnnnnnnnnnnnnnnnnnnnnnnnnnnnnnnnnnnnnnnnnnnnnnnnnnnnnnnnnnnnnnnnnnnnnnnnnnnnnnnnnnnnnnnnnnnnnnnnnnnnnnnnnnnnnnnnnnnnnnnnnnnnnnnnnnnnnnnnnnnnnnnnnnnnnnnnnnnnnnnnnnnnnnnnnnnnnnnnnnnnnnnnnnnnnnnnnnnnnnnnnnnnnnnnnnnnnnnnnnnnnnnnnnnnnnnnnnnnnnnnnnnnnnnnnnnnnnnnnnnnnnnnnnnnnnnnnnnnnnnnnnnnnnnnnnnnnnnnnnnnnnnnnnnnnnnnnnnnnnnnnnnnnnnnnnnnnnnnnnnnnnnnnnnnnnnnnnnnnnnnnnnnnnnnnnnnnnnnnnnnnnnnnnnnnnnnnnnnnnnnnnnnnnnnnnnnnnnnnnnnnnnnnnnnnnnnnnnnnnnnnnnnnnnnnnnnnnnnnnnnnnnnnnnnnnnnnnnnnnnnnnnnnnnnnnnnnnnnnnnnnnnnnnnnnnnnnnnnnnnnnnnnnnnnnnnnnnnnnnnnnnnnnnnnnnnnnnnnnnnnnnnnnnnnnnnnnnnnnnnnnnnnnnnnnnnnnnnnnnnnnnnnnnnnnnnnnnnnnnnnnnnnnnnnnnnnnnnnnnnnnnnnnnnnnnnnnnnnnnnnnnnnnnnnnnnnnnnnnnnnnnnnnnnnnnnnnnnnnnnnnnnnnnnnnnnnnnnnnnnnnnnnnnnnnnnnnnnnnnnnnnnnnnnnnnnnnnnnnnnnnnnnnnnnnnnnnnnnnnnnnnnnnnnnnnnnnnnnnnnnnnnnnnnnnnnnnnnnnnnnnnnnnnnnnnnnnnnnnnnnnnnnnnnnnnnnnnnnnnnnnnnnnnnnnnnnnnnnnnnnnnnnnnnnnnnnnnnnnnnnnnnnnnnnnnnnnnnnnnnnnnnnnnnnnnnnnnnnnnnnnnnnnnnnnnnnnnnnnnnnnnnnnnnnnnnnnnnnnnnnnnnnnnnnnnnnnnnnnnnnnnnnnnnnnnnnnnnnnnnnnnnnnnnnnnnnnnnnnnnnnnnnnnnnnnnnnnnnnnnnnnnnnnnnnnnnnnnnnnnnnnnnnnnnnnnnnnnnnnnnnnnnnnnnnnnnnnnnnnnnnnnnnnnnnnnnnnnnnnnnnnnnnnnnnnnnnnnnnnnnnnnnnnnnnnnnnnnnnnnnnnnnnnnnnnnnnnnnnnnnnnnnnnnnnnnnnnnnnnnnnnnnnnnnnnnnnnnnnnnnnnnnnnnnnnnnnnnnnnnnnnnnnnnnnnnnnnnnnnnnnnnnnnnnnnnnnnnnnnnnnnnnnnnnnnnnnnnnnnnnnnnnnnnnnnnnnnnnnnnnnnnnnnnnnnnnnnnnnnnnnnnnnnnnnnnnnnnnnnnnnnnnnnnnnnnnnnnnnnnnnnnnnnnnnnnnnnnnnnnnnnnnnnnnnnnnnnnnnnnnnnnnnnnnnnnnnnnnnnnnnnnnnnnnnnnnnnnnnnnnnnnnnnnnnnnnnnnnnnnnnnnnnnnnnnnnnnnnnnnnnnnnnnnnnnnnnnnnnnnnnnnnnnnnnnnnnnnnnnnnnnnnnnnnnnnnnnnnnnnnnnnnnnnnnnnnnnnnnnnnnnnnnnnnnnnnnnnnnnnnnnnnnnnnnnnnnnnnnnnnnnnnnnnnnnnnnnnnnnnnnnnnnnnnnnnnnnnnnnnnnnnnnnnnnnnnnnnnnnnnnnnnnnnnnnnnnnnnnnnnnnnnnnnnnnnnnnnnnnnnnnnnnnnnnnnnnnnnnnnnnnnnnnnnnnnnnnnnnnnnnnnnnnnnnnnnnnnnnnnnnnnnnnnnnnnnnnnnnnnnnnnnnnnnnnnnnnnnnnnnnnnnnnnnnnnnnnnnnnnnnnnnnnnnnnnnnnnnnnnnnnnnnnnnnnnnnnnnnnnnnnnnnnnnnnnnnnnnnnnnnnnnnnnnnnnnnnnnnnnnnnnnnnnnnnnnnnnnnnnnnnnnnnnnnnnnnnnnnnnnnnnnnnnnnnnnnnnnnnnnnnnnnnnnnnnnnnnnnnnnnnnnnnnnnnnnnnnnnnnnnnnnnnnnnnnnnnnnnnnnnnnnnnnnnnnnnnnnnnnnnnnnnnnnnnnnnnnnnnnnnnnnnnnnnnnnnnnnnnnnnnnnnnnnnnnnnnnnnnnnnnnnnnnnnnnnnnnnnnnnnnnnnnnnnnnnnnnnnnnnnnnnnnnnnnnnnnnnnnnnnnnnnnnnnnnnnnnnnnnnnnnnnnnnnnnnnnnnnnnnnnnnnnnnnnnnnnnnnnnnnnnnnnnnnnnnnnnnnnnnnnnnnnnnnnnnnnnnnnnnnnnnnnnnnnnnnnnnnnnnnnnnnnnnnnnnnnnnnnnnnnnnnnnnnnnnnnnnnnnnnnnnnnnnnnnnnnnnnnnnnnnnnnnnnnnnnnnnnnnnnnnnnnnnnnnnnnnnnnnnnnnnnnnnnnnnnnnnnnnnnnnnnnnnnnnnnnnnnnnnnnnnnnnnnnnnnnnnnnnnnnnnnnnnnnnnnnnnnnnnnnnnnnnnnnnnnnnnnnnnnnnnnnnnnnnnnnnnnnnnnnnnnnnnnnnnnnnnnnnnnnnnnnnnnnnnnnnnnnnnnnnnnnnnnnnnnnnnnnnnnnnnnnnnnnnnnnnnnnnnnnnnnnnnnnnnnnnnnnnnnnnnnnnnnnnnnnnnnnnnnnnnnnnnnnnnnnnnnnnnnnnnnnnnnnnnnnnnnnnnnnnnnnnnnnnnnnnnnnnnnnnnnnnnnnnnnnnnnnnnnnnnnnnnnnnnnnnnnnnnnnnnnnnnnnnnnnnnnnnnnnnnnnnnnnnnnnnnnnnnnnnnnnnnnnnnnnnnnnnnnnnnnnnnnnnnnnnnnnnnnnnnnnnnnnnnnnnnnnnnnnnnnnnnnnnnnnnnnnnnnnnnnnnnnnnnnnnnnnnnnnnnnnnnnnnnnnnnnnnnnnnnnnnnnnnnnnnnnnnnnnnnnnnnnnnnnnnnnnnnnnnnnnnnnnnnnnnnnnnnnnnnnnnnnnnnnnnnnnnnnnnnnnnnnnnnnnnnnnnnnnnnnnnnnnnnnnnnnnnnnnnnnnnnnnnnnnnnnnnnnnnnnnnnnnnnnnnnnnnnnnnnnnnnnnnnnnnnnnnnnnnnnnnnnnnnnnnnnnnnnnnnnnnnnnnnnnnnnnnnnnnnnnnnnnnnnnnnnnnnnnnnnnnnnnnnnnnnnnnnnnnnnnnnnnnnnnnnnnnnnnnnnnnnnnnnnnnnnnnnnnnnnnnnnnnnnnnnnnnnnnnnnnnnnnnnnnnnnnnnnnnnnnnnnnnnnnnnnnnnnnnnnnnnnnnnnnnnnnnnnnnnnnnnnnnnnnnnnnnnnnnnnnnnnnnnnnnnnnnnnnnnnnnnnnnnnnnnnnnnnnnnnnnnnnnnnnnnnnnnnnnnnnnnnnnnnnnnnnnnnnnnnnnnnnnnnnnnnnnnnnnnnnnnnnnnnnnnnnnnnnnnnnnnnnnnnnnnnnnnnnnnnnnnnnnnnnnnnnnnnnnnnnnnnnnnnnnnnnnnnnnnnnnnnnnnnnnnnnnnnnnnnnnnnnnnnnnnnnnnnnnnnnnnnnnnnnnnnnnnnnnnnnnnnnnnnnnnnnnnnnnnnnnnnnnnnnnnnnnnnnnnnnnnnnnnnnnnnnnnnnnnnnnnnnnnnnnnnnnnnnnnnnnnnnnnnnnnnnnnnnnnnnnnnnnnnnnnnnnnnnnnnnnnnnnnnnnnnnnnnnnnnnnnnnnnnnnnnnnnnnnnnnnnnnnnnnnnnnnnnnnnnnnnnnnnnnnnnnnnnnnnnnnnnnnnnnnnnnnnnnnnnnnnnnnnnnnnnnnnnnnnnnnnnnnnnnnnnnnnnnnnnnnnnnnnnnnnnnnnnnnnnnnnnnnnnnnnnnnnnnnnnnnnnnnnnnnnnnnnnnnnnnnnnnnnnnnnnnnnnnnnnnnnnnnnnnnnnnnnnnnnnnnnnnnnnnnnnnnnnnnnnnnnnnnnnnnnnnnnnnnnnnnnnnnnnnnnnnnnnnnnnnnnnnnnnnnnnnnnnnnnnnnnnnnnnnnnnnnnnnnnnnnnnnnnnnnnnnnnnnnnnnnnnnnnnnnnnnnnnnnnnnnnnnnnnnnnnnnnnnnnnnnnnnnnnnnnnnnnnnnnnnnnnnnnnnnnnnnnnnnnnnnnnnnnnnnnnnnnnnnnnnnnnnnnnnnnnnnnnnnnnnnnnnnnnnnnnnnnnnnnnnnnnnnnnnnnnnnnnnnnnnnnnnnnnnnnnnnnnnnnnnnnnnnnnnnnnnnnnnnnnnnnnnnnnnnnnnnnnnnnnnnnnnnnnnnnnnnnnnnnnnnnnnnnnnnnnnnnnnnnnnnnnnnnnnnnnnnnnnnnnnnnnnnnnnnnnnnnnnnnnnnnnnnnnnnnnnnnnnnnnnnnnnnnnnnnnnnnnnnnnnnnnnnnnnnnnnnnnnnnnnnnnnnnnnnnnnnnnnnnnnnnnnnnnnnnnnnnnnnnnnnnnnnnnnnnnnnnnnnnnnnnnnnnnnnnnnnnnnnnnnnnnnnnnnnnnnnnnnnnnnnnnnnnnnnnnnnnnnnnnnnnnnnnnnnnnnnnnnnnnnnnnnnnnnnnnnnnnnnnnnnnnnnnnnnnnnnnnnnnnnnnnnnnnnnnnnnnnnnnnnnnnnnnnnnnnnnnnnnnnnnnnnnnnnnnnnnnnnnnnnnnnnnnnnnnnnnnnnnnnnnnnnnnnnnnnnnnnnnnnnnnnnnnnnnnnnnnnnnnnnnnnnnnnnnnnnnnnnnnnnnnnnnnnnnnnnnnnnnnnnnnnnnnnnnnnnnnnnnnnnnnnnnnnnnnnnnnnnnnnnnnnnnnnnnnnnnnnnnnnnnnnnnnnnnnnnnnnnnnnnnnnnnnnnnnnnnnnnnnnnnnnnnnnnnnnnnnnnnnnnnnnnnnnnnnnnnnnnnnnnnnnnnnnnnnnnnnnnnnnnnnnnnnnnnnnnnnnnnnnnnnnnnnnnnnnnnnnnnnnnnnnnnnnnnnnnnnnnnnnnnnnnnnnnnnnnnnnnnnnnnnnnnnnnnnnnnnnnnnnnnnnnnnnnnnnnnnnnnnnnnnnnnnnnnnnnnnnnnnnnnnnnnnnnnnnnnnnnnnnnnnnnnnnnnnnnnnnnnnnnnnnnnnnnnnnnnnnnnnnnnnnnnnnnnnnnnnnnnnnnnnnnnnnnnnnnnnnnnnnnnnnnnnnnnnnnnnnnnnnnnnnnnnnnnnnnnnnnnnnnnnnnnnnnnnnnnnnnnnnnnnnnnnnnnnnnnnnnnnnnnnnnnnnnnnnnnnnnnnnnnnnnnnnnnnnnnnnnnnnnnnnnnnnnnnnnnnnnnnnnnnnnnnnnnnnnnnnnnnnnnnnnnnnnnnnnnnnnnnnnnnnnnnnnnnnnnnnnnnnnnnnnnnnnnnnnnnnnnnnnnnnnnnnnnnnnnnnnnnnnnnnnnnnnnnnnnnnnnnnnnnnnnnnnnnnnnnnnnnnnnnnnnnnnnnnnnnnnnnnnnnnnnnnnnnnnnnnnnnnnnnnnnnnnnnnnnnnnnnnnnnnnnnnnnnnnnnnnnnnnnnnnnnnnnnnnnnnnnnnnnnnnnnnnnnnnnnnnnnnnnnnnnnnnnnnnnnnnnnnnnnnnnnnnnnnnnnnnnnnnnnnnnnnnnnnnnnnnnnnnnnnnnnnnnnnnnnnnnnnnnnnnnnnnnnnnnnnnnnnnnnnnnnnnnnnnnnnnnnnnnnnnnnnnnnnnnnnnnnnnnnnnnnnnnnnnnnnnnnnnnnnnnnnnnnnnnnnnnnnnnnnnnnnnnnnnnnnnnnnnnnnnnnnnnnnnnnnnnnnnnnnnnnnnnnnnnnnnnnnnnnnnnnnnnnnnnnnnnnnnnnnnnnnnnnnnnnnnnnnnnnnnnnnnnnnnnnnnnnnnnnnnnnnnnnnnnnnnnnnnnnnnnnnnnnnnnnnnnnnnnnnnnnnnnnnnnnnnnnnnnnnnnnnnnnnnnnnnnnnnnnnnnnnnnnnnnnnnnnnnnnnnnnnnnnnnnnnnnnnnnnnnnnnnnnnnnnnnnnnnnnnnnnnnnnnnnnnnnnnnnnnnnnnnnnnnnnnnnnnnnnnnnnnnnnnnnnnnnnnnnnnnnnnnnnnnnnnnnnnnnnnnnnnnnnnnnnnnnnnnnnnnnnnnnnnnnnnnnnnnnnnnnnnnnnnnnnnnnnnnnnnnnnnnnnnnnnnnnnnnnnnnnnnnnnnnnnnnnnnnnnnnnnnnnnnnnnnnnnnnnnnnnnnnnnnnnnnnnnnnnnnnnnnnnnnnnnnnnnnnnnnnnnnnnnnnnnnnnnnnnnnnnnnnnnnnnnnnnnnnnnnnnnnnnnnnnnnnnnnnnnnnnnnnnnnnnnnnnnnnnnnnnnnnnnnnnnnnnnnnnnnnnnnnnnnnnnnnnnnnnnnnnnnnnnnnnnnnnnnnnnnnnnnnnnnnnnnnnnnnnnnnnnnnnnnnnnnnnnnnnnnnnnnnnnnnnnnnnnnnnnnnnnnnnnnnnnnnnnnnnnnnnnnnnnnnnnnnnnnnnnnnnnnnnnnnnnnnnnnnnnnnnnnnnnnnnnnnnnnnnnnnnnnnnnnnnnnnnnnnnnnnnnnnnnnnnnnnnnnnnnnnnnnnnnnnnnnnnnnnnnnnnnnnnnnnnnnnnnnnnnnnnnnnnnnnnnnnnnnnnnnnnnnnnnnnnnnnnnnnnnnnnnnnnnnnnnnnnnnnnnnnnnnnnnnnnnnnnnnnnnnnnnnnnnnnnnnnnnnnnnnnnnnnnnnnnnnnnnnnnnnnnnnnnnnnnnnnnnnnnnnnnnnnnnnnnnnnnnnnnnnnnnnnnnnnnnnnnnnnnnnnnnnnnnnnnnnnnnnnnnnnnnnnnnnnnnnnnnnnnnnnnnnnnnnnnnnnnnnnnnnnnnnnnnnnnnnnnnnnnnnnnnnnnnnnnnnnnnnnnnnnnnnnnnnnnnnnnnnnnnnnnnnnnnnnnnnnnnnnnnnnnnnnnnnnnnnnnnnnnnnnnnnnnnnnnnnnnnnnnnnnnnnnnnnnnnnnnnnnnnnnnnnnnnnnnnnnnnnnnnnnnnnnnnnnnnnnnnnnnnnnnnnnnnnnnnnnnnnnnnnnnnnnnnnnnnnnnnnnnnnnnnnnnnnnnnnnnnnnnnnnnnnnnnnnnnnnnnnnnnnnnnnnnnnnnnnnnnnnnnnnnnnnnnnnnnnnnnnnnnnnnnnnnnnnnnnnnnnnnnnnnnnnnnnnnnnnnnnnnnnnnnnnnnnnnnnnnnnnnnnnnnnnnnnnnnnnnnnnnnnnnnnnnnnnnnnnnnnnnnnnnnnnnnnnnnnnnnnnnnnnnnnnnnnnnnnnnnnnnnnnnnnnnnnnnnnnnnnnnnnnnnnnnnnnnnnnnnnnnnnnnnnnnnnnnnnnnnnnnnnnnnnnnnnnnnnnnnnnnnnnnnnnnnnnnnnnnnnnnnnnnnnnnnnnnnnnnnnnnnnnnnnnnnnnnnnnnnnnnnnnnnnnnnnnnnnnnnnnnnnnnnnnnnnnnnnnnnnnnnnnnnnnnnnnnnnnnnnnnnnnnnnnnnnnnnnnnnnnnnnnnnnnnnnnnnnnnnnnnnnnnnnnnnnnnnnnnnnnnnnnnnnnnnnnnnnnnnnnnnnnnnnnnnnnnnnnnnnnnnnnnnnnnnnnnnnnnnnnnnnnnnnnnnnnnnnnnnnnnnnnnnnnnnnnnnnnnnnnnnnnnnnnnnnnnnnnnnnnnnnnnnnnnnnnnnnnnnnnnnnnnnnnnnnnnnnnnnnnnnnnnnnnnnnnnnnnnnnnnnnnnnnnnnnnnnnnnnnnnnnnnnnnnnnnnnnnnnnnnnnnnnnnnnnnnnnnnnnnnnnnnnnnnnnnnnnnnnnnnnnnnnnnnnnnnnnnnnnnnnnnnnnnnnnnnnnnnnnnnnnnnnnnnnnnnnnnnnnnnnnnnnnnnnnnnnnnnnnnnnnnnnnnnnnnnnnnnnnnnnnnnnnnnnnnnnnnnnnnnnnnnnnnnnnnnnnnnnnnnnnnnnnnnnnnnnnnnnnnnnnnnnnnnnnnnnnnnnnnnnnnnnnnnnnnnnnnnnnnnnnnnnnnnnnnnnnnnnnnnnnnnnnnnnnnnnnnnnnnnnnnnnnnnnnnnnnnnnnnnnnnnnnnnnnnnnnnnnnnnnnnnnnnnnnnnnnnnnnnnnnnnnnnnnnnnnnnnnnnnnnnnnnnnnnnnnnnnnnnnnnnnnnnnnnnnnnnnnnnnnnnnnnnnnnnnnnnnnnnnnnnnnnnnnnnnnnnnnnnnnnnnnnnnnnnnnnnnnnnnnnnnnnnnnnnnnnnnnnnnnnnnnnnnnnnnnnnnnnnnnnnnnnnnnnnnnnnnnnnnnnnnnnnnnnnnnnnnnnnnnnnnnnnnnnnnnnnnnnnnnnnnnnnnnnnnnnnnnnnnnnnnnnnnnnnnnnnnnnnnnnnnnnnnnnnnnnnnnnnnnnnnnnnnnnnnnnnnnnnnnnnnnnnnnnnnnnnnnnnnnnnnnnnnnnnnnnnnnnnnnnnnnnnnnnnnnnnnnnnnnnnnnnnnnnnnnnnnnnnnnnnnnnnnnnnnnnnnnnnnnnnnnnnnnnnnnnnnnnnnnnnnnnnnnnnnnnnnnnnnnnnnnnnnnnnnnnnnnnnnnnnnnnnnnnnnnnnnnnnnnnnnnnnnnnnnnnnnnnnnnnnnnnnnnnnnnnnnnnnnnnnnnnnnnnnnnnnnnnnnnnnnnnnnnnnnnnnnnnnnnnnnnnnnnnnnnnnnnnnnnnnnnnnnnnnnnnnnnnnnnnnnnnnnnnnnnnnnnnnnnnnnnnnnnnnnnnnnnnnnnnnnnnnnnnnnnnnnnnnnnnnnnnnnnnnnnnnnnnnnnnnnnnnnnnnnnnnnnnnnnnnnnnnnnnnnnnnnnnnnnnnnnnnnnnnnnnnnnnnnnnnnnnnnnnnnnnnnnnnnnnnnnnnnnnnnnnnnnnnnnnnnnnnnnnnnnnnnnnnnnnnnnnnnnnnnnnnnnnnnnnnnnnnnnnnnnnnnnnnnnnnnnnnnnnnnnnnnnnnnnnnnnnnnnnnnnnnnnnnnnnnnnnnnnnnnnnnnnnnnnnnnnnnnnnnnnnnnnnnnnnnnnnnnnnnnnnnnnnnnnnnnnnnnnnnnnnnnnnnnnnnnnnnnnnnnnnnnnnnnnnnnnnnnnnnnnnnnnnnnnnnnnnnnnnnnnnnnnnnnnnnnnnnnnnnnnnnnnnnnnnnnnnnnnnnnnnnnnnnnnnnnnnnnnnnnnnnnnnnnnnnnnnnnnnnnnnnnnnnnnnnnnnnnnnnnnnnnnnnnnnnnnnnnnnnnnnnnnnnnnnnnnnnnnnnnnnnnnnnnnnnnnnnnnnnnnnnnnnnnnnnnnnnnnnnnnnnnnnnnnnnnnnnnnnnnnnnnnnnnnnnnnnnnnnnnnnnnnnnnnnnnnnnnnnnnnnnnnnnnnnnnnnnnnnnnnnnnnnnnnnnnnnnnnnnnnnnnnnnnnnnnnnnnnnnnnnnnnnnnnnnnnnnnnnnnnnnnnnnnnnnnnnnnnnnnnnnnnnnnnnnnnnnnnnnnnnnnnnnnnnnnnnnnnnnnnnnnnnnnnnnnnnnnnnnnnnnnnnnnnnnnnnnnnnnnnnnnnnnnnnnnnnnnnnnnnnnnnnnnnnnnnnnnnnnnnnnnnnnnnnnnnnnnnnnnnnnnnnnnnnnnnnnnnnnnnnnnnnnnnnnnnnnnnnnnnnnnnnnnnnnnnnnnnnnnnnnnnnnnnnnnnnnnnnnnnnnnnnnnnnnnnnnnnnnnnnnnnnnnnnnnnnnnnnnnnnnnnnnnnnnnnnnnnnnnnnnnnnnnnnnnnnnnnnnnnnnnnnnnnnnnnnnnnnnnnnnnnnnnnnnnnnnnnnnnnnnnnnnnnnnnnnnnnnnnnnnnnnnnnnnnnnnnnnnnnnnnnnnnnnnnnnnnnnnnnnnnnnnnnnnnnnnnnnnnnnnnnnnnnnnnnnnnnnnnnnnnnnnnnnnnnnnnnnnnnnnnnnnnnnnnnnnnnnnnnnnnnnnnnnnnnnnnnnnnnnnnnnnnnnnnnnnnnnnnnnnnnnnnnnnnnnnnnnnnnnnnnnnnnnnnnnnnnnnnnnnnnnnnnnnnnnnnnnnnnnnnnnnnnnnnnnnnnnnnnnnnnnnnnnnnnnnnnnnnnnnnnnnnnnnnnnnnnnnnnnnnnnnnnnnnnnnnnnnnnnnnnnnnnnnnnnnnnnnnnnnnnnnnnnnnnnnnnnnnnnnnnnnnnnnnnnnnnnnnnnnnnnnnnnnnnnnnnnnnnnnnnnnnnnnnnnnnnnnnnnnnnnnnnnnnnnnnnnnnnnnnnnnnnnnnnnnnnnnnnnnnnnnnnnnnnnnnnnnnnnnnnnnnnnnnnnnnnnnnnnnnnnnnnnnnnnnnnnnnnnnnnnnnnnnnnnnnnnnnnnnnnnnnnnnnnnnnnnnnnnnnnnnnnnnnnnnnnnnnnnnnnnnnnnnnnnnnnnnnnnnnnnnnnnnnnnnnnnnnnnnnnnnnnnnnnnnnnnnnnnnnnnnnnnnnnnnnnnnnnnnnnnnnnnnnnnnnnnnnnnnnnnnnnnnnnnnnnnnnnnnnnnnnnnnnnnnnnnnnnnnnnnnnnnnnnnnnnnnnnnnnnnnnnnnnnnnnnnnnnnnnnnnnnnnnnnnnnnnnnnnnnnnnnnnnnnnnnnnnnnnnnnnnnnnnnnnnnnnnnnnnnnnnnnnnnnnnnnnnnnnnnnnnnnnnnnnnnnnnnnnnnnnnnnnnnnnnnnnnnnnnnnnnnnnnnnnnnnnnnnnnnnnnnnnnnnnnnnnnnnnnnnnnnnnnnnnnnnnnnnnnnnnnnnnnnnnnnnnnnnnnnnnnnnnnnnnnnnnnnnnnnnnnnnnnnnnnnnnnnnnnnnnnnnnnnnnnnnnnnnnnnnnnnnnnnnnnnnnnnnnnnnnnnnnnnnnnnnnnnnnnnnnnnnnnnnnnnnnnnnnnnnnnnnnnnnnnnnnnnnnnnnnnnnnnnnnnnnnnnnnnnnnnnnnnnnnnnnnnnnnnnnnnnnnnnnnnnnnnnnnnnnnnnnnnnnnnnnnnnnnnnnnnnnnnnnnnnnnnnnnnnnnnnnnnnnnnnnnnnnnnnnnnnnnnnnnnnnnnnnnnnnnnnnnnnnnnnnnnnnnnnnnnnnnnnnnnnnnnnnnnnnnnnnnnnnnnnnnnnnnnnnnnnnnnnnnnnnnnnnnnnnnnnnnnnnnnnnnnnnnnnnnnnnnnnnnnnnnnnnnnnnnnnnnnnnnnnnnnnnnnnnnnnnnnnnnnnnnnnnnnnnnnnnnnnnnnnnnnnnnnnnnnnnnnnnnnnnnnnnnnnnnnnnnnnnnnnnnnnnnnnnnnnnnnnnnnnnnnnnnnnnnnnnnnnnnnnnnnnnnnnnnnnnnnnnnnnnnnnnnnnnnnnnnnnnnnnnnnnnnnnnnnnnnnnnnnnnnnnnnnnnnnnnnnnnnnnnnnnnnnnnnnnnnnnnnnnnnnnnnnnnnnnnnnnnnnnnnnnnnnnnnnnnnnnnnnnnnnnnnnnnnnnnnnnnnnnnnnnnnnnnnnnnnnnnnnnnnnnnnnnnnnnnnnnnnnnnnnnnnnnnnnnnnnnnnnnnnnnnnnnnnnnnnnnnnnnnnnnnnnnnnnnnnnnnnnnnnnnnnnnnnnnnnnnnnnnnnnnnnnnnnnnnnnnnnnnnnnnnnnnnnnnnnnnnnnnnnnnnnnnnnnnnnnnnnnnnnnnnnnnnnnnnnnnnnnnnnnnnnnnnnnnnnnnnnnnnnnnnnnnnnnnnnnnnnnnnnnnnnnnnnnnnnnnnnnnnnnnnnnnnnnnnnnnnnnnnnnnnnnnnnnnnnnnnnnnnnnnnnnnnnnnnnnnnnnnnnnnnnnnnnnnnnnnnnnnnnnnnnnnnnnnnnnnnnnnnnnnnnnnnnnnnnnnnnnnnnnnnnnnnnnnnnnnnnnnnnnnnnnnnnnnnnnnnnnnnnnnnnnnnnnnnnnnnnnnnnnnnnnnnnnnnnnnnnnnnnnnnnnnnnnnnnnnnnnnnnnnnnnnnnnnnnnnnnnnnnnnnnnnnnnnnnnnnnnnnnnnnnnnnnnnnnnnnnnnnnnnnnnnnnnnnnnnnnnnnnnnnnnnnnnnnnnnnnnnnnnnnnnnnnnnnnnnnnnnnnnnnnnnnnnnnnnnnnnnnnnnnnnnnnnnnnnnnnnnnnnnnnnnnnnnnnnnnnnnnnnnnnnnnnnnnnnnnnnnnnnnnnnnnnnnnnnnnnnnnnnnnnnnnnnnnnnnnnnnnnnnnnnnnnnnnnnnnnnnnnnnnnnnnnnnnnnnnnnnnnnnnnnnnnnnnnnnnnnnnnnnnnnnnnnnnnnnnnnnnnnnnnnnnnnnnnnnnnnnnnnnnnnnnnnnnnnnnnnnnnnnnnnnnnnnnnnnnnnnnnnnnnnnnnnnnnnnnnnnnnnnnnnnnnnnnnnnnnnnnnnnnnnnnnnnnnnnnnnnnnnnnnnnnnnnnnnnnnnnnnnnnnnnnnnnnnnnnnnnnnnnnnnnnnnnnnnnnnnnnnnnnnnnnnnnnnnnnnnnnnnnnnnnnnnnnnnnnnnnnnnnnnnnnnnnnnnnnnnnnnnnnnnnnnnnnnnnnnnnnnnnnnnnnnnnnnnnnnnnnnnnnnnnnnnnnnnnnnnnnnnnnnnnnnnnnnnnnnnnnnnnnnnnnnnnnnnnnnnnnnnnnnnnnnnnnnnnnnnnnnnnnnnnnnnnnnnnnnnnnnnnnnnnnnnnnnnnnnnnnnnnnnnnnnnnnnnnnnnnnnnnnnnnnnnnnnnnnnnnnnnnnnnnnnnnnnnnnnnnnnnnnnnnnnnnnnnnnnnnnnnnnnnnnnnnnnnnnnnnnnnnnnnnnnnnnnnnnnnnnnnnnnnnnnnnnnnnnnnnnnnnnnnnnnnnnnnnnnnnnnnnnnnnnnnnnnnnnnnnnnnnnnnnnnnnnnnnnnnnnnnnnnnnnnnnnnnnnnnnnnnnnnnnnnnnnnnnnnnnnnnnnnnnnnnnnnnnnnnnnnnnnnnnnnnnnnnnnnnnnnnnnnnnnnnnnnnnnnnnnnnnnnnnnnnnnnnnnnnnnnnnnnnnnnnnnnnnnnnnnnnnnnnnnnnnnnnnnnnnnnnnnnnnnnnnnnnnnnnnnnnnnnnnnnnnnnnnnnnnnnnnnnnnnnnnnnnnnnnnnnnnnnnnnnnnnnnnnnnnnnnnnnnnnnnnnnnnnnnnnnnnnnnnnnnnnnnnnnnnnnnnnnnnnnnnnnnnnnnnnnnnnnnnnnnnnnnnnnnnnnnnnnnnnnnnnnnnnnnnnnnnnnnnnnnnnnnnnnnnnnnnnnnnnnnnnnnnnnnnnnnnnnnnnnnnnnnnnnnnnnnnnnnnnnnnnnnnnnnnnnnnnnnnnnnnnnnnnnnnnnnnnnnnnnnnnnnnnnnnnnnnnnnnnnnnnnnnnnnnnnnnnnnnnnnnnnnnnnnnnnnnnnnnnnnnnnnnnnnnnnnnnnnnnnnnnnnnnnnnnnnnnnnnnnnnnnnnnnnnnnnnnnnnnnnnnnnnnnnnnnnnnnnnnnnnnnnnnnnnnnnnnnnnnnnnnnnnnnnnnnnnnnnnnnnnnnnnnnnnnnnnnnnnnnnnnnnnnnnnnnnnnnnnnnnnnnnnnnnnnnnnnnnnnnnnnnnnnnnnnnnnnnnnnnnnnnnnnnnnnnnnnnnnnnnnnnnnnnnnnnnnnnnnnnnnnnnnnnnnnnnnnnnnnnnnnnnnnnnnnnnnnnnnnnnnnnnnnnnnnnnnnnnnnnnnnnnnnnnnnnnnnnnnnnnnnnnnnnnnnnnnnnnnnnnnnnnnnnnnnnnnnnnnnnnnnnnnnnnnnnnnnnnnnnnnnnnnnnnnnnnnnnnnnnnnnnnnnnnnnnnnnnnnnnnnnnnnnnnnnnnnnnnnnnnnnnnnnnnnnnnnnnnnnnnnnnnnnnnnnnnnnnnnnnnnnnnnnnnnnnnnnnnnnnnnnnnnnnnnnnnnnnnnnnnnnnnnnnnnnnnnnnnnnnnnnnnnnnnnnnnnnnnnnnnnnnnnnnnnnnnnnnnnnnnnnnnnnnnnnnnnnnnnnnnnnnnnnnnnnnnnnnnnnnnnnnnnnnnnnnnnnnnnnnnnnnnnnnnnnnnnnnnnnnnnnnnnnnnnnnnnnnnnnnnnnnnnnnnnnnnnnnnnnnnnnnnnnnnnnnnnnnnnnnnnnnnnnnnnnnnnnnnnnnnnnnnnnnnnnnnnnnnnnnnnnnnnnnnnnnnnnnnnnnnnnnnnnnnnnnnnnnnnnnnnnnnnnnnnnnnnnnnnnnnnnnnnnnnnnnnnnnnnnnnnnnnnnnnnnnnnnnnnnnnnnnnnnnnnnnnnnnnnnnnnnnnnnnnnnnnnnnnnnnnnnnnnnnnnnnnnnnnnnnnnnnnnnnnnnnnnnnnnnnnnnnnnnnnnnnnnnnnnnnnnnnnnnnnnnnnnnnnnnnnnnnnnnnnnnnnnnnnnnnnnnnnnnnnnnnnnnnnnnnnnnnnnnnnnnnnnnnnnnnnnnnnnnnnnnnnnnnnnnnnnnnnnnnnnnnnnnnnnnnnnnnnnnnnnnnnnnnnnnnnnnnnnnnnnnnnnnnnnnnnnnnnnnnnnnnnnnnnnnnnnnnnnnnnnnnnnnnnnnnnnnnnnnnnnnnnnnnnnnnnnnnnnnnnnnnnnnnnnnnnnnnnnnnnnnnnnnnnnnnnnnnnnnnnnnnnnnnnnnnnnnnnnnnnnnnnnnnnnnnnnnnnnnnnnnnnnnnnnnnnnnnnnnnnnnnnnnnnnnnnnnnnnnnnnnnnnnnnnnnnnnnnnnnnnnnnnnnnnnnnnnnnnnnnnnnnnnnnnnnnnnnnnnnnnnnnnnnnnnnnnnnnnnnnnnnnnnnnnnnnnnnnnnnnnnnnnnnnnnnnnnnnnnnnnnnnnnnnnnnnnnnnnnnnnnnnnnnnnnnnnnnnnnnnnnnnnnnnnnnnnnnnnnnnnnnnnnnnnnnnnnnnnnnnnnnnnnnnnnnnnnnnnnnnnnnnnnnnnnnnnnnnnnnnnnnnnnnnnnnnnnnnnnnnnnnnnnnnnnnnnnnnnnnnnnnnnnnnnnnnnnnnnnnnnnnnnnnnnnnnnnnnnnnnnnnnnnnnnnnnnnnnnnnnnnnnnnnnnnnnnnnnnnnnnnnnnnnnnnnnnnnnnnnnnnnnnnnnnnnnnnnnnnnnnnnnnnnnnnnnnnnnnnnnnnnnnnnnnnnnnnnnnnnnnnnnnnnnnnnnnnnnnnnnnnnnnnnnnnnnnnnnnnnnnnnnnnnnnnnnnnnnnnnnnnnnnnnnnnnnnnnnnnnnnnnnnnnnnnnnnnnnnnnnnnnnnnnnnnnnnnnnnnnnnnnnnnnnnnnnnnnnnnnnnnnnnnnnnnnnnnnnnnnnnnnnnnnnnnnnnnnnnnnnnnnnnnnnnnnnnnnnnnnnnnnnnnnnnnnnnnnnnnnnnnnnnnnnnnnnnnnnnnnnnnnnnnnnnnnnnnnnnnnnnnnnnnnnnnnnnnnnnnnnnnnnnnnnnnnnnnnnnnnnnnnnnnnnnnnnnnnnnnnnnnnnnnnnnnnnnnnnnnnnnnnnnnnnnnnnnnnnnnnnnnnnnnnnnnnnnnnnnnnnnnnnnnnnnnnnnnnnnnnnnnnnnnnnnnnnnnnnnnnnnnnnnnnnnnnnnnnnnnnnnnnnnnnnnnnnnnnnnnnnnnnnnnnnnnnnnnnnnnnnnnnnnnnnnnnnnnnnnnnnnnnnnnnnnnnnnnnnnnnnnnnnnnnnnnnnnnnnnnnnnnnnnnnnnnnnnnnnnnnnnnnnnnnnnnnnnnnnnnnnnnnnnnnnnnnnnnnnnnnnnnnnnnnnnnnnnnnnnnnnnnnnnnnnnnnnnnnnnnnnnnnnnnnnnnnnnnnnnnnnnnnnnnnnnnnnnnnnnnnnnnnnnnnnnnnnnnnnnnnnnnnnnnnnnnnnnnnnnnnnnnnnnnnnnnnnnnnnnnnnnnnnnnnnnnnnnnnnnnnnnnnnnnnnnnnnnnnnnnnnnnnnnnnnnnnnnnnnnnnnnnnnnnnnnnnnnnnnnnnnnnnnnnnnnnnnnnnnnnnnnnnnnnnnnnnnnnnnnnnnnnnnnnnnnnnnnnnnnnnnnnnnnnnnnnnnnnnnnnnnnnnnnnnnnnnnnnnnnnnnnnnnnnnnnnnnnnnnnnnnnnnnnnnnnnnnnnnnnnnnnnnnnnnnnnnnnnnnnnnnnnnnnnnnnnnnnnnnnnnnnnnnnnnnnnnnnnnnnnnnnnnnnnnnnnnnnnnnnnnnnnnnnnnnnnnnnnnnnnnnnnnnnnnnnnnnnnnnnnnnnnnnnnnnnnnnnnnnnnnnnnnnnnnnnnnnnnnnnnnnnnnnnnnnnnnnnnnnnnnnnnnnnnnnnnnnnnnnnnnnnnnnnnnnnnnnnnnnnnnnnnnnnnnnnnnnnnnnnnnnnnnnnnnnnnnnnnnnnnnnnnnnnnnnnnnnnnnnnnnnnnnnnnnnnnnnnnnnnnnnnnnnnnnnnnnnnnnnnnnnnnnnnnnnnnnnnnnnnnnnnnnnnnnnnnnnnnnnnnnnnnnnnnnnnnnnnnnnnnnnnnnnnnnnnnnnnnnnnnnnnnnnnnnnnnnnnnnnnnnnnnnnnnnnnnnnnnnnnnnnnnnnnnnnnnnnnnnnnnnnnnnnnnnnnnnnnnnnnnnnnnnnnnnnnnnnnnnnnnnnnnnnnnnnnnnnnnnnnnnnnnnnnnnnnnnnnnnnnnnnnnnnnnnnnnnnnnnnnnnnnnnnnnnnnnnnnnnnnnnnnnnnnnnnnnnnnnnnnnnnnnnnnnnnnnnnnnnnnnnnnnnnnnnnnnnnnnnnnnnnnnnnnnnnnnnnnnnnnnnnnnnnnnnnnnnnnnnnnnnnnnnnnnnnnnnnnnnnnnnnnnnnnnnnnnnnnnnnnnnnnnnnnnnnnnnnnnnnnnnnnnnnnnnnnnnnnnnnnnnnnnnnnnnnnnnnnnnnnnnnnnnnnnnnnnnnnnnnnnnnnnnnnnnnnnnnnnnnnnnnnnnnnnnnnnnnnnnnnnnnnnnnnnnnnnnnnnnnnnnnnnnnnnnnnnnnnnnnnnnnnnnnnnnnnnnnnnnnnnnnnnnnnnnnnnnnnnnnnnnnnnnnnnnnnnnnnnnnnnnnnnnnnnnnnnnnnnnnnnnnnnnnnnnnnnnnnnnnnnnnnnnnnnnnnnnnnnnnnnnnnnnnnnnnnnnnnnnnnnnnnnnnnnnnnnnnnnnnnnnnnnnnnnnnnnnnnnnnnnnnnnnnnnnnnnnnnnnnnnnnnnnnnnnnnnnnnnnnnnnnnnnnnnnnnnnnnnnnnnnnnnnnnnnnnnnnnnnnnnnnnnnnnnnnnnnnnnnnnnnnnnnnnnnnnnnnnnnnnnnnnnnnnnnnnnnnnnnnnnnnnnnnnnnnnnnnnnnnnnnnnnnnnnnnnnnnnnnnnnnnnnnnnnnnnnnnnnnnnnnnnnnnnnnnnnnnnnnnnnnnnnnnnnnnnnnnnnnnnnnnnnnnnnnnnnnnnnnnnnnnnnnnnnnnnnnnnnnnnnnnnnnnnnnnnnnnnnnnnnnnnnnnnnnnnnnnnnnnnnnnnnnnnnnnnnnnnnnnnnnnnnnnnnnnnnnnnnnnnnnnnnnnnnnnnnnnnnnnnnnnnnnnnnnnnnnnnnnnnnnnnnnnnnnnnnnnnnnnnnnnnnnnnnnnnnnnnnnnnnnnnnnnnnnnnnnnnnnnnnnnnnnnnnnnnnnnnnnnnnnnnnnnnnnnnnnnnnnnnnnnnnnnnnnnnnnnnnnnnnnnnnnnnnnnnnnnnnnnnnnnnnnnnnnnnnnnnnnnnnnnnnnnnnnnnnnnnnnnnnnnnnnnnnnnnnnnnnnnnnnnnnnnnnnnnnnnnnnnnnnnnnnnnnnnnnnnnnnnnnnnnnnnnnnnnnnnnnnnnnnnnnnnnnnnnnnnnnnnnnnnnnnnnnnnnnnnnnnnnnnnnnnnnnnnnnnnnnnnnnnnnnnnnnnnnnnnnnnnnnnnnnnnnnnnnnnnnnnnnnnnnnnnnnnnnnnnnnnnnnnnnnnnnnnnnnnnnnnnnnnnnnnnnnnnnnnnnnnnnnnnnnnnnnnnnnnnnnnnnnnnnnnnnnnnnnnnnnnnnnnnnnnnnnnnnnnnnnnnnnnnnnnnnnnnnnnnnnnnnnnnnnnnnnnnnnnnnnnnnnnnnnnnnnnnnnnnnnnnnnnnnnnnnnnnnnnnnnnnnnnnnnnnnnnnnnnnnnnnnnnnnnnnnnnnnnnnnnnnnnnnnnnnnnnnnnnnnnnnnnnnnnnnnnnnnnnnnnnnnnnnnnnnnnnnnnnnnnnnnnnnnnnnnnnnnnnnnnnnnnnnnnnnnnnnnnnnnnnnnnnnnnnnnnnnnnnnnnnnnnnnnnnnnnnnnnnnnnnnnnnnnnnnnnnnnnnnnnnnnnnnnnnnnnnnnnnnnnnnnnnnnnnnnnnnnnnnnnnnnnnnnnnnnnnnnnnnnnnnnnnnnnnnnnnnnnnnnnnnnnnnnnnnnnnnnnnnnnnnnnnnnnnnnnnnnnnnnnnnnnnnnnnnnnnnnnnnnnnnnnnnnnnnnnnnnnnnnnnnnnnnnnnnnnnnnnnnnnnnnnnnnnnnnnnnnnnnnnnnnnnnnnnnnnnnnnnnnnnnnnnnnnnnnnnnnnnnnnnnnnnnnnnnnnnnnnnnnnnnnnnnnnnnnnnnnnnnnnnnnnnnnnnnnnnnnnnnnnnnnnnnnnnnnnnnnnnnnnnnnnnnnnnnnnnnnnnnnnnnnnnnnnnnnnnnnnnnnnnnnnnnnnnnnnnnnnnnnnnnnnnnnnnnnnnnnnnnnnnnnnnnnnnnnnnnnnnnnnnnnnnnnnnnnnnnnnnnnnnnnnnnnnnnnnnnnnnnnnnnnnnnnnnnnnnnnnnnnnnnnnnnnnnnnnnnnnnnnnnnnnnnnnnnnnnnnnnnnnnnnnnnnnnnnnnnnnnnnnnnnnnnnnnnnnnnnnnnnnnnnnnnnnnnnnnnnnnnnnnnnnnnnnnnnnnnnnnnnnnnnnnnnnnnnnnnnnnnnnnnnnnnnnnnnnnnnnnnnnnnnnnnnnnnnnnnnnnnnnnnnnnnnnnnnnnnnnnnnnnnnnnnnnnnnnnnnnnnnnnnnnnnnnnnnnnnnnnnnnnnnnnnnnnnnnnnnnnnnnnnnnnnnnnnnnnnnnnnnnnnnnnnnnnnnnnnnnnnnnnnnnnnnnnnnnnnnnnnnnnnnnnnnnnnnnnnnnnnnnnnnnnnnnnnnnnnnnnnnnnnnnnnnnnnnnnnnnnnnnnnnnnnnnnnnnnnnnnnnnnnnnnnnnnnnnnnnnnnnnnnnnnnnnnnnnnnnnnnnnnnnnnnnnnnnnnnnnnnnnnnnnnnnnnnnnnnnnnnnnnnnnnnnnnnnnnnnnnnnnnnnnnnnnnnnnnnnnnnnnnnnnnnnnnnnnnnnnnnnnnnnnnnnnnnnnnnnnnnnnnnnnnnnnnnnnnnnnnnnnnnnnnnnnnnnnnnnnnnnnnnnnnnnnnnnnnnnnnnnnnnnnnnnnnnnnnnnnnnnnnnnnnnnnnnnnnnnnnnnnnnnnnnnnnnnnnnnnnnnnnnnnnnnnnnnnnnnnnnnnnnnnnnnnnnnnnnnnnnnnnnnnnnnnnnnnnnnnnnnnnnnnnnnnnnnnnnnnnnnnnnnnnnnnnnnnnnnnnnnnnnnnnnnnnnnnnnnnnnnnnnnnnnnnnnnnnnnnnnnnnnnnnnnnnnnnnnnnnnnnnnnnnnnnnnnnnnnnnnnnnnnnnnnnnnnnnnnnnnnnnnnnnnnnnnnnnnnnnnnnnnnnnnnnnnnnnnnnnnnnnnnnnnnnnnnnnnnnnnnnnnnnnnnnnnnnnnnnnnnnnnnnnnnnnnnnnnnnnnnnnnnnnnnnnnnnnnnnnnnnnnnnnnnnnnnnnnnnnnnnnnnnnnnnnnnnnnnnnnnnnnnnnnnnnnnnnnnnnnnnnnnnnnnnnnnnnnnnnnnnnnnnnnnnnnnnnnnnnnnnnnnnnnnnnnnnnnnnnnnnnnnnnnnnnnnnnnnnnnnnnnnnnnnnnnnnnnnnnnnnnnnnnnnnnnnnnnnnnnnnnnnnnnnnnnnnnnnnnnnnnnnnnnnnnnnnnnnnnnnnnnnnnnnnnnnnnnnnnnnnnnnnnnnnnnnnnnnnnnnnnnnnnnnnnnnnnnnnnnnnnnnnnnnnnnnnnnnnnnnnnnnnnnnnnnnnnnnnnnnnnnnnnnnnnnnnnnnnnnnnnnnnnnnnnnnnnnnnnnnnnnnnnnnnnnnnnnnnnnnnnnnnnnnnnnnnnnnnnnnnnnnnnnnnnnnnnnnnnnnnnnnnnnnnnnnnnnnnnnnnnnnnnnnnnnnnnnnnnnnnnnnnnnnnnnnnnnnnnnnnnnnnnnnnnnnnnnnnnnnnnnnnnnnnnnnnnnnnnnnnnnnnnnnnnnnnnnnnnnnnnnnnnnnnnnnnnnnnnnnnnnnnnnnnnnnnnnnnnnnnnnnnnnnnnnnnnnnnnnnnnnnnnnnnnnnnnnnnnnnnnnnnnnnnnnnnnnnnnnnnnnnnnnnnnnnnnnnnnnnnnnnnnnnnnnnnnnnnnnnnnnnnnnnnnnnnnnnnnnnnnnnnnnnnnnnnnnnnnnnnnnnnnnnnnnnnnnnnnnnnnnnnnnnnnnnnnnnnnnnnnnnnnnnnnnnnnnnnnnnnnnnnnnnnnnnnnnnnnnnnnnnnnnnnnnnnnnnnnnnnnnnnnnnnnnnnnnnnnnnnnnnnnnnnnnnnnnnnnnnnnnnnnnnnnnnnnnnnnnnnnnnnnnnnnnnnnnnnnnnnnnnnnnnnnnnnnnnnnnnnnnnnnnnnnnnnnnnnnnnnnnnnnnnnnnnnnnnnnnnnnnnnnnnnnnnnnnnnnnnnnnnnnnnnnnnnnnnnnnnnnnnnnnnnnnnnnnnnnnnnnnnnnnnnnnnnnnnnnnnnnnnnnnnnnnnnnnnnnnnnnnnnnnnnnnnnnnnnnnnnnnnnnnnnnnnnnnnnnnnnnnnnnnnnnnnnnnnnnnnnnnnnnnnnnnnnnnnnnnnnnnnnnnnnnnnnnnnnnnnnnnnnnnnnnnnnnnnnnnnnnnnnnnnnnnnnnnnnnnnnnnnnnnnnnnnnnnnnnnnnnnnnnnnnnnnnnnnnnnnnnnnnnnnnnnnnnnnnnnnnnnnnnnnnnnnnnnnnnnnnnnnnnnnnnnnnnnnnnnnnnnnnnnnnnnnnnnnnnnnnnnnnnnnnnnnnnnnnnnnnnnnnnnnnnnnnnnnnnnnnnnnnnnnnnnnnnnnnnnnnnnnnnnnnnnnnnnnnnnnnnnnnnnnnnnnnnnnnnnnnnnnnnnnnnnnnnnnnnnnnnnnnnnnnnnnnnnnnnnnnnnnnnnnnnnnnnnnnnnnnnnnnnnnnnnnnnnnnnnnnnnnnnnnnnnnnnnnnnnnnnnnnnnnnnnnnnnnnnnnnnnnnnnnnnnnnnnnnnnnnnnnnnnnnnnnnnnnnnnnnnnnnnnnnnnnnnnnnnnnnnnnnnnnnnnnnnnnnnnnnnnnnnnnnnnnnnnnnnnnnnnnnnnnnnnnnnnnnnnnnnnnnnnnnnnnnnnnnnnnnnnnnnnnnnnnnnnnnnnnnnnnnnnnnnnnnnnnnnnnnnnnnnnnnnnnnnnnnnnnnnnnnnnnnnnnnnnnnnnnnnnnnnnnnnnnnnnnnnnnnnnnnnnnnnnnnnnnnnnnnnnnnnnnnnnnnnnnnnnnnnnnnnnnnnnnnnnnnnnnnnnnnnnnnnnnnnnnnnnnnnnnnnnnnnnnnnnnnnnnnnnnnnnnnnnnnnnnnnnnnnnnnnnnnnnnnnnnnnnnnnnnnnnnnnnnnnnnnnnnnnnnnnnnnnnnnnnnnnnnnnnnnnnnnnnnnnnnnnnnnnnnnnnnnnnnnnnnnnnnnnnnnnnnnnnnnnnnnnnnnnnnnnnnnnnnnnnnnnnnnnnnnnnnnnnnnnnnnnnnnnnnnnnnnnnnnnnnnnnnnnnnnnnnnnnnnnnnnnnnnnnnnnnnnnnnnnnnnnnnnnnnnnnnnnnnnnnnnnnnnnnnnnnnnnnnnnnnnnnnnnnnnnnnnnnnnnnnnnnnnnnnnnnnnnnnnnnnnnnnnnnnnnnnnnnnnnnnnnnnnnnnnnnnnnnnnnnnnnnnnnnnnnnnnnnnnnnnnnnnnnnnnnnnnnnnnnnnnnnnnnnnnnnnnnnnnnnnnnnnnnnnnnnnnnnnnnnnnnnnnnnnnnnnnnnnnnnnnnnnnnnnnnnnnnnnnnnnnnnnnnnnnnnnnnnnnnnnnnnnnnnnnnnnnnnnnnnnnnnnnnnnnnnnnnnnnnnnnnnnnnnnnnnnnnnnnnnnnnnnnnnnnnnnnnnnnnnnnnnnnnnnnnnnnnnnnnnnnnnnnnnnnnnnnnnnnnnnnnnnnnnnnnnnnnnnnnnnnnnnnnnnnnnnnnnnnnnnnnnnnnnnnnnnnnnnnnnnnnnnnnnnnnnnnnnnnnnnnnnnnnnnnnnnnnnnnnnnnnnnnnnnnnnnnnnnnnnnnnnnnnnnnnnnnnnnnnnnnnnnnnnnnnnnnnnnnnnnnnnnnnnnnnnnnnnnnnnnnnnnnnnnnnnnnnnnnnnnnnnnnnnnnnnnnnnnnnnnnnnnnnnnnnnnnnnnnnnnnnnnnnnnnnnnnnnnnnnnnnnnnnnnnnnnnnnnnnnnnnnnnnnnnnnnnnnnnnnnnnnnnnnnnnnnnnnnnnnnnnnnnnnnnnnnnnnnnnnnnnnnnnnnnnnnnnnnnnnnnnnnnnnnnnnnnnnnnnnnnnnnnnnnnnnnnnnnnnnnnnnnnnnnnnnnnnnnnnnnnnnnnnnnnnnnnnnnnnnnnnnnnnnnnnnnnnnnnnnnnnnnnnnnnnnnnnnnnnnnnnnnnnnnnnnnnnnnnnnnnnnnnnnnnnnnnnnnnnnnnnnnnnnnnnnnnnnnnnnnnnnnnnnnnnnnnnnnnnnnnnnnnnnnnnnnnnnnnnnnnnnnnnnnnnnnnnnnnnnnnnnnnnnnnnnnnnnnnnnnnnnnnnnnnnnnnnnnnnnnnnnnnnnnnnnnnnnnnnnnnnnnnnnnnnnnnnnnnnnnnnnnnnnnnnnnnnnnnnnnnnnnnnnnnnnnnnnnnnnnnnnnnnnnnnnnnnnnnnnnnnnnnnnnnnnnnnnnnnnnnnnnnnnnnnnnnnnnnnnnnnnnnnnnnnnnnnnnnnnnnnnnnnnnnnnnnnnnnnnnnnnnnnnnnnnnnnnnnnnnnnnnnnnnnnnnnnnnnnnnnnnnnnnnnnnnnnnnnnnnnnnnnnnnnnnnnnnnnnnnnnnnnnnnnnnnnnnnnnnnnnnnnnnnnnnnnnnnnnnnnnnnnnnnnnnnnnnnnnnnnnnnnnnnnnnnnnnnnnnnnnnnnnnnnnnnnnnnnnnnnnnnnnnnnnnnnnnnnnnnnnnnnnnnnnnnnnnnnnnnnnnnnnnnnnnnnnnnnnnnnnnnnnnnnnnnnnnnnnnnnnnnnnnnnnnnnnnnnnnnnnnnnnnnnnnnnnnnnnnnnnnnnnnnnnnnnnnnnnnnnnnnnnnnnnnnnnnnnnnnnnnnnnnnnnnnnnnnnnnnnnnnnnnnnnnnnnnnnnnnnnnnnnnnnnnnnnnnnnnnnnnnnnnnnnnnnnnnnnnnnnnnnnnnnnnnnnnnnnnnnnnnnnnnnnnnnnnnnnnnnnnnnnnnnnnnnnnnnnnnnnnnnnnnnnnnnnnnnnnnnnnnnnnnnnnnnnnnnnnnnnnnnnnnnnnnnnnnnnnnnnnnnnnnnnnnnnnnnnnnnnnnnnnnnnnnnnnnnnnnnnnnnnnnnnnnnnnnnnnnnnnnnnnnnnnnnnnnnnnnnnnnnnnnnnnnnnnnnnnnnnnnnnnnnnnnnnnnnnnnnnnnnnnnnnnnnnnnnnnnnnnnnnnnnnnnnnnnnnnnnnnnnnnnnnnnnnnnnnnnnnnnnnnnnnnnnnnnnnnnnnnnnnnnnnnnnnnnnnnnnnnnnnnnnnnnnnnnnnnnnnnnnnnnnnnnnnnnnnnnnnnnnnnnnnnnnnnnnnnnnnnnnnnnnnnnnnnnnnnnnnnnnnnnnnnnnnnnnnnnnnnnnnnnnnnnnnnnnnnnnnnnnnnnnnnnnnnnnnnnnnnnnnnnnnnnnnnnnnnnnnnnnnnnnnnnnnnnnnnnnnnnnnnnnnnnnnnnnnnnnnnnnnnnnnnnnnnnnnnnnnnnnnnnnnnnnnnnnnnnnnnnnnnnnnnnnnnnnnnnnnnnnnnnnnnnnnnnnnnnnnnnnnnnnnnnnnnnnnnnnnnnnnnnnnnnnnnnnnnnnnnnnnnnnnnnnnnnnnnnnnnnnnnnnnnnnnnnnnnnnnnnnnnnnnnnnnnnnnnnnnnnnnnnnnnnnnnnnnnnnnnnnnnnnnnnnnnnnnnnnnnnnnnnnnnnnnnnnnnnnnnnnnnnnnnnnnnnnnnnnnnnnnnnnnnnnnnnnnnnnnnnnnnnnnnnnnnnnnnnnnnnnnnnnnnnnnnnnnnnnnnnnnnnnnnnnnnnnnnnnnnnnnnnnnnnnnnnnnnnnnnnnnnnnnnnnnnnnnnnnnnnnnnnnnnnnnnnnnnnnnnnnnnnnnnnnnnnnnnnnnnnnnnnnnnnnnnnnnnnnnnnnnnnnnnnnnnnnnnnnnnnnnnnnnnnnnnnnnnnnnnnnnnnnnnnnnnnnnnnnnnnnnnnnnnnnnnnnnnnnnnnnnnnnnnnnnnnnnnnnnnnnnnnnnnnnnnnnnnnnnnnnnnnnnnnnnnnnnnnnnnnnnnnnnnnnnnnnnnnnnnnnnnnnnnnnnnnnnnnnnnnnnnnnnnnnnnnnnnnnnnnnnnnnnnnnnnnnnnnnnnnnnnnnnnnnnnnnnnnnnnnnnnnnnnnnnnnnnnnnnnnnnnnnnnnnnnnnnnnnnnnnnnnnnnnnnnnnnnnnnnnnnnnnnnnnnnnnnnnnnnnnnnnnnnnnnnnnnnnnnnnnnnnnnnnnnnnnnnnnnnnnnnnnnnnnnnnnnnnnnnnnnnnnnnnnnnnnnnnnnnnnnnnnnnnnnnnnnnnnnnnnnnnnnnnnnnnnnnnnnnnnnnnnnnnnnnnnnnnnnnnnnnnnnnnnnnnnnnnnnnnnnnnnnnnnnnnnnnnnnnnnnnnnnnnnnnnnnnnnnnnnnnnnnnnnnnnnnnnnnnnnnnnnnnnnnnnnnnnnnnnnnnnnnnnnnnnnnnnnnnnnnnnnnnnnnnnnnnnnnnnnnnnnnnnnnnnnnnnnnnnnnnnnnnnnnnnnnnnnnnnnnnnnnnnnnnnnnnnnnnnnnnnnnnnnnnnnnnnnnnnnnnnnnnnnnnnnnnnnnnnnnnnnnnnnnnnnnnnnnnnnnnnnnnnnnnnnnnnnnnnnnnnnnnnnnnnnnnnnnnnnnnnnnnnnnnnnnnnnnnnnnnnnnnnnnnnnnnnnnnnnnnnnnnnnnnnnnnnnnnnnnnnnnnnnnnnnnnnnnnnnnnnnnnnnnnnnnnnnnnnnnnnnnnnnnnnnnnnnnnnnnnnnnnnnnnnnnnnnnnnnnnnnnnnnnnnnnnnnnnnnnnnnnnnnnnnnnnnnnnnnnnnnnnnnnnnnnnnnnnnnnnnnnnnnnnnnnnnnnnnnnnnnnnnnnnnnnnnnnnnnnnnnnnnnnnnnnnnnnnnnnnnnnnnnnnnnnnnnnnnnnnnnnnnnnnnnnnnnnnnnnnnnnnnnnnnnnnnnnnnnnnnnnnnnnnnnnnnnnnnnnnnnnnnnnnnnnnnnnnnnnnnnnnnnnnnnnnnnnnnnnnnnnnnnnnnnnnnnnnnnnnnnnnnnnnnnnnnnnnnnnnnnnnnnnnnnnnnnnnnnnnnnnnnnnnnnnnnnnnnnnnnnnnnnnnnnnnnnnnnnnnnnnnnnnnnnnnnnnnnnnnnnnnnnnnnnnnnnnnnnnnnnnnnnnnnnnnnnnnnnnnnnnnnnnnnnnnnnnnnnnnnnnnnnnnnnnnnnnnnnnnnnnnnnnnnnnnnnnnnnnnnnnnnnnnnnnnnnnnnnnnnnnnnnnnnnnnnnnnnnnnnnnnnnnnnnnnnnnnnnnnnnnnnnnnnnnnnnnnnnnnnnnnnnnnnnnnnnnnnnnnnnnnnnnnnnnnnnnnnnnnnnnnnnnnnnnnnnnnnnnnnnnnnnnnnnnnnnnnnnnnnnnnnnnnnnnnnnnnnnnnnnnnnnnnnnnnnnnnnnnnnnnnnnnnnnnnnnnnnnnnnnnnnnnnnnnnnnnnnnnnnnnnnnnnnnnnnnnnnnnnnnnnnnnnnnnnnnnnnnnnnnnnnnnnnnnnnnnnnnnnnnnnnnnnnnnnnnnnnnnnnnnnnnnnnnnnnnnnnnnnnnnnnnnnnnnnnnnnnnnnnnnnnnnnnnnnnnnnnnnnnnnnnnnnnnnnnnnnnnnnnnnnnnnnnnnnnnnnnnnnnnnnnnnnnnnnnnnnnnnnnnnnnnnnnnnnnnnnnnnnnnnnnnnnnnnnnnnnnnnnnnnnnnnnnnnnnnnnnnnnnnnnnnnnnnnnnnnnnnnnnnnnnnnnnnnnnnnnnnnnnnnnnnnnnnnnnnnnnnnnnnnnnnnnnnnnnnnnnnnnnnnnnnnnnnnnnnnnnnnnnnnnnnnnnnnnnnnnnnnnnnnnnnnnnnnnnnnnnnnnnnnnnnnnnnnnnnnnnnnnnnnnnnnnnnnnnnnnnnnnnnnnnnnnnnnnnnnnnnnnnnnnnnnnnnnnnnnnnnnnnnnnnnnnnnnnnnnnnnnnnnnnnnnnnnnnnnnnnnnnnnnnnnnnnnnnnnnnnnnnnnnnnnnnnnnnnnnnnnnnnnnnnnnnnnnnnnnnnnnnnnnnnnnnnnnnnnnnnnnnnnnnnnnnnnnnnnnnnnnnnnnnnnnnnnnnnnnnnnnnnnnnnnnnnnnnnnnnnnnnnnnnnnnnnnnnnnnnnnnnnnnnnnnnnnnnnnnnnnnnnnnnnnnnnnnnnnnnnnnnnnnnnnnnnnnnnnnnnnnnnnnnnnnnnnnnnnnnnnnnnnnnnnnnnnnnnnnnnnnnnnnnnnnnnnnnnnnnnnnnnnnnnnnnnnnnnnnnnnnnnnnnnnnnnnnnnnnnnnnnnnnnnnnnnnnnnnnnnnnnnnnnnnnnnnnnnnnnnnnnnnnnnnnnnnnnnnnnnnnnnnnnnnnnnnnnnnnnnnnnnnnnnnnnnnnnnnnnnnnnnnnnnnnnnnnnnnnnnnnnnnnnnnnnnnnnnnnnnnnnnnnnnnnnnnnnnnnnnnnnnnnnnnnnnnnnnnnnnnnnnnnnnnnnnnnnnnnnnnnnnnnnnnnnnnnnnnnnnnnnnnnnnnnnnnnnnnnnnnnnnnnnnnnnnnnnnnnnnnnnnnnnnnnnnnnnnnnnnnnnnnnnnnnnnnnnnnnnnnnnnnnnnnnnnnnnnnnnnnnnnnnnnnnnnnnnnnnnnnnnnnnnnnnnnnnnnnnnnnnnnnnnnnnnnnnnnnnnnnnnnnnnnnnnnnnnnnnnnnnnnnnnnnnnnnnnnnnnnnnnnnnnnnnnnnnnnnnnnnnnnnnnnnnnnnnnnnnnnnnnnnnnnnnnnnnnnnnnnnnnnnnnnnnnnnnnnnnnnnnnnnnnnnnnnnnnnnnnnnnnnnnnnnnnnnnnnnnnnnnnnnnnnnnnnnnnnnnnnnnnnnnnnnnnnnnnnnnnnnnnnnnnnnnnnnnnnnnnnnnnnnnnnnnnnnnnnnnnnnnnnnnnnnnnnnnnnnnnnnnnnnnnnnnnnnnnnnnnnnnnnnnnnnnnnnnnnnnnnnnnnnnnnnnnnnnnnnnnnnnnnnnnnnnnnnnnnnnnnnnnnnnnnnnnnnnnnnnnnnnnnnnnnnnnnnnnnnnnnnnnnnnnnnnnnnnnnnnnnnnnnnnnnnnnnnnnnnnnnnnnnnnnnnnnnnnnnnnnnnnnnnnnnnnnnnnnnnnnnnnnnnnnnnnnnnnnnnnnnnnnnnnnnnnnnnnnnnnnnnnnnnnnnnnnnnnnnnnnnnnnnnnnnnnnnnnnnnnnnnnnnnnnnnnnnnnnnnnnnnnnnnnnnnnnnnnnnnnnnnnnnnnnnnnnnnnnnnnnnnnnnnnnnnnnnnnnnnnnnnnnnnnnnnnnnnnnnnnnnnnnnnnnnnnnnnnnnnnnnnnnnnnnnnnnnnnnnnnnnnnnnnnnnnnnnnnnnnnnnnnnnnnnnnnnnnnnnnnnnnnnnnnnnnnnnnnnnnnnnnnnnnnnnnnnnnnnnnnnnnnnnnnnnnnnnnnnnnnnnnnnnnnnnnnnnnnnnnnnnnnnnnnnnnnnnnnnnnnnnnnnnnnnnnnnnnnnnnnnnnnnnnnnnnnnnnnnnnnnnnnnnnnnnnnnnnnnnnnnnnnnnnnnnnnnnnnnnnnnnnnnnnnnnnnnnnnnnnnnnnnnnnnnnnnnnnnnnnnnnnnnnnnnnnnnnnnnnnnnnnnnnnnnnnnnnnnnnnnnnnnnnnnnnnnnnnnnnnnnnnnnnnnnnnnnnnnnnnnnnnnnnnnnnnnnnnnnnnnnnnnnnnnnnnnnnnnnnnnnnnnnnnnnnnnnnnnnnnnnnnnnnnnnnnnnnnnnnnnnnnnnnnnnnnnnnnnnnnnnnnnnnnnnnnnnnnnnnnnnnnnnnnnnnnnnnnnnnnnnnnnnnnnnnnnnnnnnnnnnnnnnnnnnnnnnnnnnnnnnnnnnnnnnnnnnnnnnnnnnnnnnnnnnnnnnnnnnnnnnnnnnnnnnnnnnnnnnnnnnnnnnnnnnnnnnnnnnnnnnnnnnnnnnnnnnnnnnnnnnnnnnnnnnnnnnnnnnnnnnnnnnnnnnnnnnnnnnnnnnnnnnnnnnnnnnnnnnnnnnnnnnnnnnnnnnnnnnnnnnnnnnnnnnnnnnnnnnnnnnnnnnnnnnnnnnnnnnnnnnnnnnnnnnnnnnnnnnnnnnnnnnnnnnnnnnnnnnnnnnnnnnnnnnnnnnnnnnnnnnnnnnnnnnnnnnnnnnnnnnnnnnnnnnnnnnnnnnnnnnnnnnnnnnnnnnnnnnnnnnnnnnnnnnnnnnnnnnnnnnnnnnnnnnnnnnnnnnnnnnnnnnnnnnnnnnnnnnnnnnnnnnnnnnnnnnnnnnnnnnnnnnnnnnnnnnnnnnnnnnnnnnnnnnnnnnnnnnnnnnnnnnnnnnnnnnnnnnnnnnnnnnnnnnnnnnnnnnnnnnnnnnnnnnnnnnnnnnnnnnnnnnnnnnnnnnnnnnnnnnnnnnnnnnnnnnnnnnnnnnnnnnnnnnnnnnnnnnnnnnnnnnnnnnnnnnnnnnnnnnnnnnnnnnnnnnnnnnnnnnnnnnnnnnnnnnnnnnnnnnnnnnnnnnnnnnnnnnnnnnnnnnnnnnnnnnnnnnnnnnnnnnnnnnnnnnnnnnnnnnnnnnnnnnnnnnnnnnnnnnnnnnnnnnnnnnnnnnnnnnnnnnnnnnnnnnnnnnnnnnnnnnnnnnnnnnnnnnnnnnnnnnnnnnnnnnnnnnnnnnnnnnnnnnnnnnnnnnnnnnnnnnnnnnnnnnnnnnnnnnnnnnnnnnnnnnnnnnnnnnnnnnnnnnnnnnnnnnnnnnnnnnnnnnnnnnnnnnnnnnnnnnnnnnnnnnnnnnnnnnnnnnnnnnnnnnnnnnnnnnnnnnnnnnnnnnnnnnnnnnnnnnnnnnnnnnnnnnnnnnnnnnnnnnnnnnnnnnnnnnnnnnnnnnnnnnnnnnnnnnnnnnnnnnnnnnnnnnnnnnnnnnnnnnnnnnnnnnnnnnnnnnnnnnnnnnnnnnnnnnnnnnnnnnnnnnnnnnnnnnnnnnnnnnnnnnnnnnnnnnnnnnnnnnnnnnnnnnnnnnnnnnnnnnnnnnnnnnnnnnnnnnnnnnnnnnnnnnnnnnnnnnnnnnnnnnnnnnnnnnnnnnnnnnnnnnnnnnnnnnnnnnnnnnnnnnnnnnnnnnnnnnnnnnnnnnnnnnnnnnnnnnnnnnnnnnnnnnnnnnnnnnnnnnnnnnnnnnnnnnnnnnnnnnnnnnnnnnnnnnnnnnnnnnnnnnnnnnnnnnnnnnnnnnnnnnnnnnnnnnnnnnnnnnnnnnnnnnnnnnnnnnnnnnnnnnnnnnnnnnnnnnnnnnnnnnnnnnnnnnnnnnnnnnnnnnnnnnnnnnnnnnnnnnnnnnnnnnnnnnnnnnnnnnnnnnnnnnnnnnnnnnnnnnnnnnnnnnnnnnnnnnnnnnnnnnnnnnnnnnnnnnnnnnnnnnnnnnnnnnnnnnnnnnnnnnnnnnnnnnnnnnnnnnnnnnnnnnnnnnnnnnnnnnnnnnnnnnnnnnnnnnnnnnnnnnnnnnnnnnnnnnnnnnnnnnnnnnnnnnnnnnnnnnnnnnnnnnnnnnnnnnnnnnnnnnnnnnnnnnnnnnnnnnnnnnnnnnnnnnnnnnnnnnnnnnnnnnnnnnnnnnnnnnnnnnnnnnnnnnnnnnnnnnnnnnnnnnnnnnnnnnnnnnnnnnnnnnnnnnnnnnnnnnnnnnnnnnnnnnnnnnnnnnnnnnnnnnnnnnnnnnnnnnnnnnnnnnnnnnnnnnnnnnnnnnnnnnnnnnnnnnnnnnnnnnnnnnnnnnnnnnnnnnnnnnnnnnnnnnnnnnnnnnnnnnnnnnnnnnnnnnnnnnnnnnnnnnnnnnnnnnnnnnnnnnnnnnnnnnnnnnnnnnnnnnnnnnnnnnnnnnnnnnnnnnnnnnnnnnnnnnnnnnnnnnnnnnnnnnnnnnnnnnnnnnnnnnnnnnnnnnnnnnnnnnnnnnnnnnnnnnnnnnnnnnnnnnnnnnnnnnnnnnnnnnnnnnnnnnnnnnnnnnnnnnnnnnnnnnnnnnnnnnnnnnnnnnnnnnnnnnnnnnnnnnnnnnnnnnnnnnnnnnnnnnnnnnnnnnnnnnnnnnnnnnnnnnnnnnnnnnnnnnnnnnnnnnnnnnnnnnnnnnnnnnnnnnnnnnnnnnnnnnnnnnnnnnnnnnnnnnnnnnnnnnnnnnnnnnnnnnnnnnnnnnnnnnnnnnnnnnnnnnnnnnnnnnnnnnnnnnnnnnnnnnnnnnnnnnnnnnnggggatggtgatggtgctggtgggagtgaaggtagtggtggtggtgatggtggtggtgatggtgggagtgaaggtagtggtggtggggatggtgatggtgctggtgggagtgaaggtagtggtggtgatggtggtggtggtggtggtggtgatggtgatggtggtggtgggagtgaaggtggtggtggtggtgatggtggtggtggtgggagtgaaagtggtggtggtggtggtgggagtgaaggtagtggtggtggtgatggtggtggtggtggtgggagtgaaggtggtggtggtggtgatcgtgatggtggtggtgggagtgaaggtggtggtggtgatggtggtgatactggttgtagtgatggtagtgatggtggtgatcgtgagggtgatgctggtggtgatgggaacagtgacagttgtattggtggtagtattggtgatggggtgggaatggtgagaagccaaactgagatggatcgagggagctggagcaaatgcattcagcactcactgctgaactgaatgatgaccctgggtgaaactagtccctaggtgaacctctctagtgtaccttttttttttgcttgaaaactttattaaaataaggattaaacctgaaaaaagaacaatcagaatgccagccctttatataaaatcagcaagaaaaaggaaagagagagagaaacagagaatagtgtactttttatgagtcaggttagcctagaagttaagaagtgggctcccctgcaggtcaaatttaggttctgtcaattattagctgtctgaccttagaaaggttacttgacctctctgagacccagcttcaccatttgctaatggggacactggcacctgcctgggggcggtggaacagactgtgtttgcagggtgcctgatcggacactgaagcacctcagttgatggaaactgctgctgtgactcttcggcctagagtcaaacctgcagagccaggaggttccattgcaaagcatcggccaaggctgtcacaggggtgccccctgggcccctcctatctttactaccccagcaatacagtctggtggtattcgtggcccacttcatgttgctatgacttggagatgtagcagaaggtgagcgggcttgcctctccagtgcttcacgctctcattccagctgtgccttcacccccatgtcctccgaaactgacacaatcacatctctagcatctcagcttctgcatctgtaaaatgggatgagagttgcaatccttacccgagagctgtggtgaggatcaaagggacaatggtcacacctgtaaaagagagaggaggatcctgcggtaggtggccacaccatggccatcgttgttaccacagttgtcgcctccctcataggatgctgtgatctcggagagttggagacctcttatgctgatgagcacttgggccctggccagctggaccaggctacccccacaggtacacggcatctggtgttttcacagccagggtacaatgagagaggaaggtgtgggccctgaggcctctggtggtgggttgagagaaatgtgtgtgccagtctccatgcccacatccatggagccctcagttgactagagccctccccttcccctggggaggggaaggaagacacactgggagaggactggcccaggaacttccttcaaggacaagggacgaaagctgagcctttagtggtaattcaagttgcaccctctgagcagagccccatgcaggccaagccatgccaacatgggctggtttggagactgcgtttgtttgtaggtggcattggcctcaatggctcaatctagtatttttctcacccaacgagtctggaggtcgaggcttgtctcatttgtgtccttgggattgtaatttatggaggtaactgaatgagaacgcagagaagccaatcccattgaaagaagaatttgttactcacaggtcctgagatggggggcatgccatgccacgcagggctgtatggggagcagcagttttggacagaaggcagaaatgggcaaggagagggcacaggccagagtatgtattggggtttcctcgggaaatgtagagcggggaacagctcaggatctgctaattcgagtaattccggcatgctttgggctctaggggaggtctctagttgcctggcacctggccctgggatgatttagagcaggggcattattggcctggtgtatgagagttaaacagaggtagtcgtgtgcatagactcaggattggttggtttgtaaataagaagcccaggactgcccttcagtatctctcagagttgggtagccctgggaaggccagtctctccctggccagcaagacttttaagatgtcaaacatcccagctacatgggaggctgaggcaggagaatcgcttgaacccaggaggccgagattgcagtaagccaagatcgcgccactgcactccaggctggcaactgagtgagattccatctaaaaaaaaataaataaataagtcagacatcataagatatagaaaataaaaaaacaggcagggcatggtggctcatgcctgtaatcccagcactttgggaggctgaagcaggcagatcactaaaggtcaggagtttgagaccagcctggccaacatggtgaaaccctgtctctactaaagatacaaaaattagccgcgtgtggtggcgggcacctgtaatctcagttatttgggaggctgaggaaggagatttgcttgaacctgggaggcggaggttgcagtaagctgagatcacgccactgcactctgttctgggtgacagagtgagactccatcaaaagaaaaaaagaaaagaaaagagaaaacgtgaatacaaggctccacatgccaccagggacccaggacctgtctatttttccagccactcctagtggggttttagtggaggtgcttggctgcttcatggttgcaagatggctgctctgtcccagcctttagtcctttgtccaggcagcaaagggcaaagggaaaggcatgtcccagcagagtctgtttcttttgaagcagatttctccacggccccctcaacccaaactcagtgctcctctctgcacggtcacgtgcactcctagatgcaaatgaggctggggatgtagggcttttagttggacatttgaggggctaaagtggaggatgggtacagggtcatccctgggagtttcggctgtggcctctgtgagtgccctgggactgctacactaattaccagggacttggaaactgagggcaactgaaatttgctctcatgttctcaaggccagaagcacaaagtcaaggtgtgaggggccctgcccctctgaaaattccagaagagggtccttcgttgtctcctccagcttcaggaggctagtcattccttgacttggggccacgtcactccagcctccgctcactccgtctgcagtggctttctcctctgactgcgcctctgtgtcttctcttctgtttgtctcaggtccccttctgcttttttcttttttgtgggggacagtctcactctgtcacccaggctggagtgcaatggcgcgatctcgctcactgcaacctctgcctcctgggttcaagcgattcttctgcctcagcctcccgagtacctgggactacaggtgcccaccaccaagcccagctaatttttgcatttttagtagagacagggtttcaccatgttggccaggctggtcttgaactcctgacctcaggtgatccgcctgcctcggcctcccaaagtgctgggattacaggcatgagtcaccacacctggtctgcttttctcttataagaacacttgctcttggatttagggtccacccagataatccgtggtgacctcatttccagatctttaatttaaaaacatctgtaaaagccctttccaaataagtcacatgcacaagttctgggggttaggatgtggatttaccttcctggggggccaccattcaacccactacagccgccttcccaaaacagcccctaagatccagttgctgggtgcctgttatatgcgaggtgccagggctctgggtgctctctcaacagccctaccaggcagccactgaaacccactttacaatgaggaaagaaaggctgaggagcaggatccaaacctagaacctcagtccatgacctttctcctactttccaccccaattgtgcaagaaaagtctttgcaaactgtgatcacaatgaaaaaaatactccttcttattctcgtgctcacaagcccagcccagatcccatttcttgtgtgtgtttttttgttttgttttgttttttttttgagacagagtttcactcttgttgtgcaatggcgtgatctcagctcactgcaacctcctcccaggttcaagcgattctcctgcctcagccttccaagtagctgagattacaggcacccaccactatgcctggctaactttttgtactattagtaaagatggggtttccccatgttgcccaggctggtctcgaactcctgacctcaggtgatctgcccaccttggcctcccaaagtgctgggattacaggcctgagccactgtacccagttctcaggttttttaatggtttgttcaagttctggtgagcacgcaggccagtagcagtgaatggcaaggcagggctgtctttcttctttccagttctctccctgctcagctcctcctcttggcctcaggtccttcagaaaccccctgaagttccctgcaggggtgggcacatgggctggtgctctctgaacagggccacctgggatccccagctgtacccctggcctcctgctggccctgggacatcaggccttgcttctcagtgtccctcagtactgtttcagggcaccccttgtaggctctgctcgttgaaacggggcctgctctccaagcttctcaatttcagaaatcttcggcagcttggggacattcaaggtcaccctgggctcccaaagtcacagccacccacctccaagaagccctgcagtcctgcaaacgagaaggaaacagtacttcttcccttccctgagcttccacgggctttgttcccctccacatgggaggcgcctctgctgaaaaggccggcctgatacctgcagacaattccattggccacagccaagtttccacgtcaggaggctgtgggctgggggtggcagcactgggtcctgggggccgcgtggaagcttctcagagggagggcagcttttagggatttgatggtgagacgtagttggcttcaattttctaaattgatccttcaactcctaagtaaaaggaaagcacgagttcctgccacgtgccaggtgggggttccgctgggccttttcagagaccgtcattaagttcttttcagctgctgccagtcagatgccgtgggccccacttccaggctgtggtctgtcattatctgtcattagcagctgtacctgcagaggacttgaggttcctggagctgtcccaaggaccacacgccagctgcctggcaccatgggctttgctcatggcctggctctgggctctaagggcttgttgggggactgaacagggccctgctccctgagggacctcagaggaagcactgggatgagcatctgggagaacagtctgactgagattgtcccctccccagccaacaggcttccagggtcagttggaacaccatgtttctttgctacaggggccccttctcccttagtggtcctgaggaagccagagccacatagcatgggctgtgacggcccccttaacagccagcacccatgcgtgtcctttagcccaatagcgctgataccacagggaccggcctgcattctcaccctggctggtgggggagggaagcagggtgcaaggtgcggcacacagctcctgtcccaacaaagaggggccttcttccaccagctcatggcaggacagcttctcacattcattcctgctccttcctatctgctgcttcaaaatatgaacaggacattgatgagcaaaagtaacagaggctcctgaaccagctgagagcagctcccttcctccctggggccgccccactggcagtcctgatgtgcagaaggcaccaaatggatgcttgccaatagtgaagaagagagacagagggtgacgggcacgcacacacacacacgcactctccaggctagagcaacacacatcaccagggagctgctggagggagggagcaccccaggcttctgccctcctttctctctacatcttgaaggtgggggcagggggcctttttgacatcacccagcataagaaatcctgccctcccatttccagctgagttgccagagcttccctccgggttggggagagggaagacgggggcagctccaggcagcctgacatgaggctccgctgctgcttggggcgaccaggcaggtcccccactggtaagccaaggagccaactgacccccacccacatccatcctgcccaggcatcaccgtcagccccttggagtaactgttcctgacctcagaagcccgatgtggccacgggctgccccatctctccgggtgaggggggcacacacccgccatggcattggccatggatgggccacagtgctctctgctggtgaagtgcatccctgggctcccccgggcacgcctctggtggggggctgtggtcaggacagcgagtccctgggtggctgttggagcagcctgggatttcattcattcattcattcatttatttctggcttgggcgctccatccatcggagcttttagccctttgtccacacttcccgaggattggttccaggggtctgctggcagctccaggtcagctgcattgaccatgatgcctcctgggcctctggggtctttgggagcctgtcccctcttccatcattgtccccgaagctgcctttcacaggggccttgagggtccagactcattaaagttggcaatgcccttactgtccacacattgttaccggctccccagaggaaaccacgaagggaactgcccatgcttgcaaagaagggcacgtggacttttaaaccctctggtcaccttccaagtccctttggcccaaagagtgctgcaagggggcatgtgcctggcagagctgcaccctgctggctgccctccagtgcagacccaccgtgcaagactccgcccctccagagactgtgccccctggtggaggcatcctcaggagcctcctgggcttccttcctccatctgcctccttgagtggaagcgacgggccccaggtgagaggctccgcatggctggaggctgaggagaggccagcacctgcttcccgcagagggaggggaggcctcctgtctgcacaaaccgaccttgcaaattggtggccagaggcggtgggtgtttgctgagctgctggtgcctaaaccaggcaactcccaagtctctggcaagggctggggctgaacagaaggattacgattgctcccttgaaatatttaacctttgctcccagcagtcagaaggccaatgaaaccaggagagaaaacaccaaggtaacaggagtcttccaaaactgcgatgcgatttggcctggaggggctgagtgctttttcttctttctgctcttcttgctcttggaacggctacaatgcaccagaccgcaggaagctacttctgatacgcagagatgcccatgaaatggaagtgccagtggaggatgagctcacaacgggcacttgctgtgcagaaagtggatttgatgaaactaagcctggggccaaaaatgctaaaaggtgaaagcaaacatggcggaccaaaggtctctaacgtttaaaaaacagaaaggacacaaaattagataagggcaacgccccttgaaatttctggttcgttctcggggttccagcccaatactaatacttttctcaacaagagccaggacacctcagggccccactgcccccaggccgggcgtggagtccaggacggggcatcttctgtccgccccacgccttctcataaatgtgttttctgcgacggggtgggaccagcactggcagaggcagcagccgcagaccctccacagagctgggcactgattcaaacagagaagccaagaaactcagacagcgaaggaggaggagacacagaaaccatggaggggaatttgttttaaaggagagtaggggaaacttaggtgttatttctcatcaaaggagtctaataaattaaataggaaataaagtcataataaagatttccaaagtaaaagctgccttagggtggcattggggatggccttggacaagggggagtagtggtgccgtgtcagtgaatatgcttaacagagacccgagaccatcgcagagtaacagagatgcccactgcagataatcagctgacgcccgccgcggtgcctgggaaactcagactctgttcaccctgcggcttctgccatcctcacagcacagtttccacggcaaccccatgaatgcgtgcagggccgggcatctggaaataggtgtccaaagtcacgtgcaaccagcagcaggctcaacaacaaggaaggcagagcgtcacaatggccacagcaataaccacaataacaagagtggcagagctgagggcagtccccagtgtgccaggcgccgagctgagctggacatcgtctcactcacggcaggagcctgtcctgcggaggaggatgtggagggcggccagttgtgtagcttacaaactccagccgggactccagcctgagatgagccgctgcagagtccacactcccaatccccaggccagaagttcttaacctccaccaggaccacctaggagctgtttgaaatacaggctcccgggccccatccccacagctttgatctataggtcagaagtggagccacgaatctgcattttgacaaaccctccagatgatatgagaatggtgggcctcggagctcactgagaaaagtcagacaccaccccagacaagtctggtttcacagggagggccgggccaccctgcactcaccggttggatcagaaagtcaacagcaggactccaggttcgttggaatttggccatcagcgatgcttccaaatttggagcctggcacaagcgcagagacacatctgtctccgcatctcactcatctcctgccattccaattctccccacgtccaccaaggtggccgccgccattgtggccacttcccagtttctggctggatctgcccaggtcgggcccccagctggctgcaaatgctgatggagaaatcgagggccttgcacagggacacgcctcgagtggtgaggaaaggcccaatgtgggatgtgttttgaaggcacagtcaacagagctagctgatgggttggatgcgggtgggaggggacccccaactccgtggagatcccgggcttgtggcctgagtggccgggtgggctccagtcctcctgactgaagttgagccaaccaagggggaagaggtgcagggggtggacccatgaattaagagccggccactaagtcgaggtgcccattgacacccacatggggattccctgcagacttgggatacattttattacaagtccaatattatatgaacattcattgcttttacagtaagaaaaaaagccaaaccttctagccatgattttttataaagaaacaaattcttggccgggtgccgtggttcatgcctggaatcccagcacttagggaggccaacacgggcaggtcacctgaggttaggagttcgagaccagcctggccaacatgatgaaaccctgtctttattaaaaatacaaaaagtagctgggcgtggtgatgcacacctgtagtcccagctactcaggagcctgaggcaggagaatcacttgaacctgggaggtggaggttgcagtgagcctggagggaggcagggccaggagagagaccagggggtgctcactgaggctgtagccagggacaccacttctcccagggtggaaggtggggtgtggggtttgccctggcctgggagtgatcaagcctgggagaacctcaaacgtccccactggccatcctcgtgtgtgggcgtgatctgtcatattatcccagaggtcccagcaagcctcctggccctgctgctccctcttggtcccagaccccgacagtgggactcccaggtgtgactgctgttgagtttgccttcatcagcactggggttgatccccccggaaatgggggagtcccacgtgcacagagaatcccagcaaggacctggcaggaagggatggaccctgcggggagccagggagggctggggggtgccaagtgggcaatgatgactcgggactgggtagggatggaggccatgggggaactgagctgggttctgagcaggtgaggccaggagccaagacccaggagtcttcatgagtcccgcccccttttctataaggtgcagggtgtgggggacgttgctgtgagacacaagcagccataccccaggaacaggggcccgggagctggccctgctccctggatgttcactgtggactctgtcagggtcgatgatggagctgagagctggggacagaaacccctgtccccagaagcgagatcaccgcatgtctcagtccgttcccgctgctgtaatgatgtaccatagactggtggcttctaagcatggacatttatttttcacagccttgcaggctgcaaggctgagctcagggcaccagcagggtcggattcccgtgagcgcctgcggctgggttacagacaacatccttcgtctgtgtccctgcgtgtggaaggactgagggagctctgtgtggcctttatcagggcgtgaatcccacgaacacggctccaccctgaggatctccccacctcctcaaggccccatggcctcccaatgccatcatgatgcggtgaggatttcaacagatgagtttctgggggcaccaacattcagatcatagcggccggcaggtgccacagcccccaccccggccgctggcaacccaggcttccctgatctcctgggtaccagtagcccctaagtagccaggctggagggggcagccaggaaggtggtggtggccccaggaggcaggctgtagggacagagaccaatgccacccatgacaaatgccaccagggcctgggggctcacgctcaccctgacagcctcgaaaagcacccttcaccaacggtgctccgagggttcacagtagctcagggtattggagaacttcctgagggccggctctggaggagctgtcattctcccatgtgggcctggagtgcctgtgtggcaggaacagaccctggagatgccacagtcaggctcagctctgttatctggagagcttcctccctggtttctggcccctctcacctcggcatgcttgcctagcgctgttttgtttacagctgtcttttgcccaggggaaaacccaacgccagcagacgcctcctctctccttagatgagaagaaagccctggtggaatgggacctgctgacctgccctgcatgcggcgttttgcggtagatgctggaaagccgggtggaagggaatgggacctgctcacctgccctgcatgtggtgttttgtggcagatactggaaagccgggtggaaggggatgggacctgctgacctgccctgcatgcggcgttttgtggtagatgctggaaagccaggtggaagggaatcggactttgctctgtgcacggtgttttgtggtagatactggaaagccaggtcaaaggggattggacctgctgacctgccctgcatgcggcgttttgtggtagatgctggaaaacagggtggaaggggttgggacctgctgacctgctctgcatgtggcatttcgtagtagatgctggaaagccgggtctcgccccgtccttcccctttgcacaccctcccgggctcccctcccctccccaggttggaaatgcaaggagaaggaaatgaaagactaggggagtgggtttcctttttgtgcctctggtctttccagggttttctccagtttggggaattgcaagcccgtgacagctcaatgcaccacagaccccaagggccgtggtctgtgccagagagcacagcgaaccgtggcccggccagtgtggcctgtgtaagttggactctggtctgggggactgcccaggcagggctgggggtaaaagtccactcagagtctctgcatgtggctggagtttagcagctggctggggtgagccgctgcttgcggagtttcctgaagagcctgggctgctgatgctgggacactctcagctcctggttcctcagggctccagtcccacagatccatccactgcagggcccagggcccagtgagcctttgggactgccctccctccatcctgtgtgagaagagggttagatgggcggccttgtgggggcaacgggacactggccagcttcttccttacaaagcaagggtctttctgagactctccctcctaggtggggaagcggcatgatgagaaggtgaggtacgcttccaagggggtcccctctccccccacctccccactccctgcctgggctgtcaggcacatgtgcaggaaaagtaggaagcagccaggccaggcgctctgtgagcagcctgattcctcacccaggccctgcagcagtgatggtttcaggcaccagcaaagggaggggtgatgctggagctctgggagcaaagtgggtgggggaagctctggacatcgggatgtgcccgggacatccaggcaccaggagatgggcaaggcaagaaaggcagcccttccacacagtcctgccagttccacactcgaggtaggcacagcagaggtgctcatccctccaccccgagctgagcccttcagtaatgtccaggaagctatggcagtgggtcagacgattgtggggtcccatcgcctgggaagcaggaagctgccctcctccctccatctgctctgcttggtggaggctcctttcctacaattctccatgcctcatgtgccaaaggaaacaaacctgactttgtgggggcgcctatgggagcctggagcgcttgccagagcagctgggagctcggtgtttttgctgcaaatggaagcagttcatagaggcccagagtgtgaaggggaagcatgcacatgatctcctgactagcaagcaagtggcttcccttccctcggggacccacacacagacaagccggggaggaggtgccctgaccacgtacacatgcccaagggaggaggtgtccccaccacagacaccaggtgagggggtgtccccaccacagacaccaggtgagggggtgtccccactagagagacagcaggtgagggtgtgtccccaccacagacatcaggtgagggggtgtccccaccacagacaccaggtgagggggtgtccccaccacagacatcaggtgagggggtgtccccaccacagacaccaggtgagggggtgtccccaccacagacaccaggtgagggggtgtccccaccagagagacagcaggtgagggggtgtccccaccacagagacaccaggtgagggtgtgtccccaccagagagacagcaggtgagggggtgtccccagcacacagacaccaggtgaggggtgtccccagcacagagacagcaggtgagggggtgtccccaccacagagacatcagatgagggggtgtccccaccacagagacagcaggtgagtgggtgtccccaccacagagacagcaggtgagggggtgtccccaccatagagacagcaggtgaggggtgtccccagcacagagacagcaggtgaggaggtgtccccaccacagagacagcaggtgaggggtgtccccagcacagagacagcaggtgaggaggtgtccccagcacagtgacagcaggtgaggggtgtccccagcacagagacagcaggtgaggaggtgtccccactacagacaccaggtgagggtgtgtccccagcacagagacggcaaatgaggaggtgtctccaccacagagatggcaggtgaggaggcgtctccacacaaatcctgatgggtgcccatgccaggaaatactctttggtaggttaggggctctgcactggtgtggccgaatttgcggaggtgatttctctgagttgacttaatttctgacctccttggtcaactttcattcacagtccatgtattcccaagagctggcgggagaccgtggggctgtttggagaggaatatgtctactgggtttgtgcctggcctgtcatcctgccttgatgagggcaggttcctgaaagtcccctccaaatcacaggcatgacatttgtcaagaaggaagcagtgaagctttgggaagagtaagctcagggcagaattcatgccaggtagagacagcctcaaaggagacaactcggccagcaagggaaccaccagatggctcgtgggggaggcctgtctggggaagcccagtggtgcgggcatcgctgggggtcctcgtgacacagctgggccctccgcacacaatcacacacccggtgcatgggcagagcatggatttctctgcctggctccggggatatttcactgtggaactgacagttcctgccccgtcccattctctgcagtgggaggatcgctggagccgaggttgtggggcactctcctgctcctgccatgaaaaatcagccgcctcggctgtgtcctccccaccctcccagggccccgcggtcctttgtgacgaaaacaagccctgtaggatgaggtctggctgggcttcttggaggtgacccatcccatttttttttagtcccctaaaaaaaataagtccaaaacagtgtttcggaaatggtggaatgcaatgtttatagttaacgaatcaacgtttagctcataaaaattcaaagcggcctaattgtgctactcaaaacagaattataggattgattacaaatgtgactttgtggttcatgaggctaatgggccaagtagaaagccgtcaggggcctcttgtctttgtccagtcagtggcacccagagacggtgtgtgccttcggtcctgggtgaaggcgagcctggctcttgtgcaagctccggccactccccggcaggccctgggtcttgcctttgtcttctcagggcccaccaagtagcccgaagtccttagcttagaactcaagcctctgtgatcccgcccaggtgagctggccggggtgtttcctgtccctccccaccggatcctctcgtgtggccctggtggtgtgttcagctccccgaggggccaccatccagcccactgtcacagccagtctgctctgtggggacctgaagagtctgcccccgtccctagcaggtccagtcagcagcaggacgaggcttcacccagtgggagccgacgtggggcatccacctgtctgcccgtattcccaggagcacccccaaggcctccccacctgtggctgcagactttgcaacgggagctccgcctcttctctccgcaagggagggagagtcttctgcctcagtgtgaacaccattcatagggaagcgttccctgtccatgaatgaggagagagtgttatgtaacatatgcaaaaataggcttacgctcaagtgtgttccaagggtaggaggagagctctttatttaagctcctcatgaagtggtttggcttctgtcaaatggaatcctgggcgacactgagcagaatgtgttctgctcgcggaggacagaggttaattgagtgaattggtgaggaggctgctgggcggtgctgggcggtgctgggcgatgaacattggttctcacagtgcgctcgctcccctccagcccctgctacattaagacttgttctttgcttaagtgcggtgtttgatgctgtctgtctatccatctggatatctgcccacgtacccatccatccgcacactcctctgggggtacagggcaggaaggtgggggtgaacagcctgatacggagagggggtggggtgggaagtgacccacttcaggccaggcacaaagacggggccagcaggacgggtgtgccaggctccggcctcccctttggtgctctcaggtgactgaagctccctgccacctgcccgtctcatggccccgcccattttagctcatcaaacgctggccatgagtcaaggcaggctccctaacctctcccacggctaccactgagtccccacagaccccaggaggaaggaactgcgatgatccccatgttacagaaggggaagccgaggcactgagtccccacagaccctaggaggaaggaactgtgatgatccccatgttacagaaggggaagccgaggcacagcagattgagcatgtcacccacgtcacaccaagttgggatttgagccttagcagccggccccagagcctggccctgctcgtgtcggggaatggcgagctcccccacccaggaaagcagcgtgtttgtgggaggcaattttggcgtgggctcaggaggcgggaggcaactttggtgtgggctcaggaggtccgggctccaggcctggctgagacaccatttcagccacgtgactgaaaaggaacagtccccctaccgtcccctccaccttggtgctctctctccatttggctctgtctgtgggagttttgtttaacccgcatggcaggcacacggggagagaggggaactggccatctgtgggccctcgcagctggtgtggcagaggcaggcagcgaagacgctctgtgtccgtgcagtgaacccgctgggtccgttctggcggccatcacacgtgctcataggctgggggctcataagcaacagaaacctgtttctcactgttctggttcactgttgtggagctggacacccgcggtcaaggcgcccccagattcagtgtctgtctgctttctggttcatcgatggcaccttctggctgtatccacgtgcggcagaaggagcaaaggaactctctggggtccctttcataagggcgctaatcccattcgcaagggctccacctccccagagccccacctcctcacgccagcacactgggggagagacttcaatatctgaatttagcgggatacactgagaccacagcaaaaccccagagacccaggctctgccctcccagtacttcctgacagcggctgcagtgtgtgctgcactggaccgcccgagggccggaggggaggcagagctcagggaaggggcgggcaccatctaacacaggaggggtaggggggcctccctgatggcacgccattgcacagaccccaggaaagtaaggaggcagtgcctggagaaagagctgtccaggcagcaggaacggcacgtgccaaggccccggggcagcagcaggcttgggcgctccagaaggggcaggccagtgaggctggaggggaggggaggaagtgtcgagggcaggtggaggggaggggaggtggaagggaggtagaggggaggggaggggaggtggaggtggaggggaggtggaggtagaggggaggggaggtggaggtgaggtgaggtggaggtggaggggaagtggaggggaggtagagaggaggggaagggaggtagaggggtgggaaagggaagtggaggggaggaggaggtggaggggaggtggaggtggaggggaggtggagggggagggggaggggaggggaggtggaggtggaggggaggtggaggggaggggaggtggaggggaggggaggtggaggggaggggaggtggaggggaggggaggtggaggggcgttggaggggaggtggaggtggaggggaggtggagggggagggggaagggaggggaggtggaggtagagggaaggggaggtggaggggaggtggaggtggaggggaggggaggtggaggtagaggggaggtggaggtagaggggagatggagggggaggggaggtagagggggaggggaggggaggtggaggggagttggaggggaggtggaggtagagggggaagggaggggaggtggaggggagttggaggggaggtggaggtggagggggaagggaggggaggtggaggaagagggaaggggaggtggaggtggaggggaagtggaggtggaggggatggggagggggaggggaggggaggtggaggggcaggggaggtggaggggcagtggaggtggaggggacggggaaggtggaggtagaggggaggggaggggaggtggaggtggaggggatggggaggtggaggggaggggaggtggaggggaggtggagatggaggtagaggggaggtggaggtggggggaggggaggggaggtggaggtggcggggaggggaggtggaggggagggaaggtggaggggaggggaggtggaggtagaggggaggtggaggtagaggggaggtggaggtagaggggacgggaggggaggtggaggggaggggaggggaggtggaggtagaggggaggtggaggtagggggaggggaggggaggtgggggcagaggggaggtggaggtagggggaggggaggggaggggaggtggtcatagaaggctgtggcaggggttgcttcattgcttgcaaaaaggtcacaccactgcataaccccaccaacagaaagcaggtcagcggttgcctgtggcaggtaggaggagattttgagggtgggggaaaggccccgaatcctgcctgtggcagtggtctcgtggtgtagacatctgtcaaactcaccgatctggatggtttaaatgagtgcagcttattgtgcacaagcgattcctccattgaaaaaccacaggagaaaagagctcctcaaggcctccaagccgtgggtagcaaaatggaaaccagccctggttttggggaaacacgatgatgatgcagtgggtcatccgaggtctgtcccgggggacatctccacagtgcaggtctgggagagtaaacatcactgcacacccaggacaggaggtggccgctcaccccatctgcatctataggcgtgcgctgtgggcggcagggtgagtggggacccccgggggatgggctgcctcgcctgggcttgtgctttgactcagggatggtgccggggctgtggtgctgggagaaggggtttgagaacctgaagcctgcacttcagtggaaatcaagcccctggggctggaataggccccctcctcccgatgttcatcctggagggtgtagagatgaaaaagggcgtgatgattctggggttccctgggctaggggagcttccaggtggaaactgaggcacttgcctcagcgtctggcaaagtgagagtggggcatcaggaggggcctctgccagcccagaaggactttgtagccacccagtgtcccccagggcccaagggctgccttgcagcagccttggctgccagcctctgctgttggtaaggacccagctccccactcctggactcccccacttggcatggggtgcatcctgggacttctgcagctccggccgctccctgcagcgggggctgataagctcctcctctccccaccacaccccctctgctctcagcctccccatcacctccccatcacagcccagcccccggcctcagttccccgcaacaccatgttcagcaatctccctgggtgactttgcacccagagggaccccctctcactccccaaacctgactgttctccagccctggaaccacaggcctccagagggctctcctggccccatacctatcagccagctcccccgcctaccccgtcatgcctctgcccttccccactggcctgcagccgggttcccagcctcagactctcggcacctctgacctacttgaacctggcccttgccccagccacagcaggcactgctcgttcccctctgcttacccccacctgtctggacccagctcccccttcaggcctgtggacccagcaggagcagagaatgggtcatgtgtgggtttccaggtgggcagaggcgggcacaggcaaggacgcctgcaggaggtatccagggacttagcaaacgagcggagtagagaggtgggggcagcaggcagggtgaggagagggtccaggagggggtccaggagggggccagtctccggctacagggacagaatggccaggcctcaggccacaacgccctgattagtgaagccttgccttgtggccgagtgagacaggggcgcattataggaggcaggccacagcctcctggtcctgggccccgtgggtcggtgggaaccagccccttgagcacctgctgtgggcagaccctggaggtgcgagggcacgtgcatcagtcagcctcagatgactttgcccaatcaggacagcacccattccacggaaaaggaaactgaggctccaaaaagcagtctggctcaggcgtgacgcagtggctgaggctgagtccagggccagatgttctctactgtgtattctcaggaggatgtgggggtcagacgatgcagggacatctggaactgcaccagcacagaaccgacacgttgttagtcatcgtcactcggcagggctgaagaccaccagaactcatgacaggcagacgtgcctggcccagttgaggatgtagcctcagagccaagcgccagtcctgttggccacgtgggctgggggcaggatagaccaggtcagcattcacaaggtgcaagaagagtgggagctgttcatctgggtttaggagctgtcagaaggaggctagtttcttaccaccagagctgcactgagctcgcaggacagtggatctcagccttggctgatggagtcagccagttctgattatctgtctgggggtgtcaaggctccagagtccaactgcacagctccccaccacttgcggccagtggttgtggcagcatctccgagtctgtgtctgcaactctcatccctgtgttgagctgaccacagtgtttggcatggtgcctggcacatggtaagtgctcaaagaaccttaggcctcagaactgtgactgcctttggatggcagatctagaaaagaggccgtacgttcttccagttcccctgacaggtttacatcatggctgcacctaatgatcattgggactcacctatcatgtcccatcttacttatccatccatccatccatccatccattcatccattcatctctccatccattatccatctttctatcattcatcatccatccatcatctattcatccatccatccattcatccatccatccatccatccattcatccatccatccatccattcatctattcatctctccatccattatccatctttctatcattcattatccatccatcatctattcatccatccattcatccatccatgtatccattcatccatccacctatccatctgttcatccatccatcagtcattcatccttccatcattcatcatccatccatccatcatctattcatctatccatccatttatctacttatccatccatccatccatccatccatccatccatccatgcatccatttcagagaactgaaaacatgttcacagaaaaacttgcacatgaatgtttatggcagcattattcgtaagagccaaacagtggaaacaactcaaatatccatcaattggtgattggataaacaaaacaagatacatgcataaaatggaatatcattgtctataaaaagggatgaaatgctgatacatgctaccatgtggatgaattctgaaaacattatactgagtataatccatccgttcattcatccatccatccatccatttatcacccattcatccatccacccatctattcatctatccatccatcatccacccttccatcattcatcatccatccatccatcatctattcatccatccatacattcatctgtctatccacccattcacctgtttatttatccattcatccatccatttatccatccatccatctattcatccatccgtcagtgtatctacttattcatccatccatccattcatccagccatttatccacccatttatccatccatccatctatccacccatttatccatccatccatctgttcatccattcatccacctaatctttctgtttatttgctttttctctctatgaagctacctgttctgggcatgtcatatctaacatgtggctttttgtgtgtggcttttttactcagtaaaatgttttcagaattcatccacatagtagcatgtatcaacatttcatccctttttatagataaatgatattccattttatgcatgtatcttgttttgtttatccaatcaccaattgatggatatttgagttgtttccactgtttggctcttacaaataatgctgccgtaaacattcatgtgcaagtttttctgtgaacatgttttcagttctcttgtgtatacaccttggagcggaattgctggtgccttgatgttttattcccaaactgctagtatcacaaaataatacccttcagtattgttggtatttatttaggcttaacttcacatgcaacttgggaactagacccggccagtggggagtgcttgcaagaggaacctggaaaagtggaaggtctagatctgtaagtccaagttctcatgttgaaagggcaacatagatgttcttattattcaaattagaccaaaatgtgtttgttctgtgtctgaattattgtataccttggaaaacctatttaggattcacatgagaagacagccaaagaggacaaatttatgtcattcataagatcgttcaaaaatagtcacagaatgtccatctggtgccagaagtttgttgaatgttgggatataaataaatataatgattaagttcaaattattacctcatctttgtttctttgcatcattgtcctcgaatgtggcctattcgctgcttttctcagtgttttctataaggtgataattaaaacatcaacccgaaagacaatcattgtgggccgaattgtgctcctccaagtccatatgttgcagccctagcccccggcaccacagaatgtccttatttggaggtagggaccttaaagaggtgattaaggtaaaattaggccattggcatggcccctaattgaatctgactggtgtccttgtaagaagagtggattaggacactgacaaacacacagggatgaccactcaaggacacatggagaagacgccatctagaagccaaggagagagccctcaggaggcaccagccctgctggattaggacactgacacacacagagggatgaccactcaaggacacacggagaagacgccatctagaagccaaggagagagccctcaggaggcaccagccctgctggattaggacactgacacacacagagggatgaccactcaaggacacacggagaagacgccatctagaagccaaggagagaggcctcgggaggcaccagccctgctggattaggacaccgccacacacagagggatgaccactcaaggacacatggagaagacgccatctagaagccaaggagagaggcctcaggaggcaccagccctgctggattaggacaccagcacacacagagggatgaccactcaaggacacacggagaagacgccatctagaagccaaggagagagccctcaggaggcaccagccctgctggattaggacaccgacacacacagagggatgaccactcaaggacacatggagaagacaccatctagaagccaaggagagaggcctcgggaggcaccagccctgctggattaggacaccgacacacacagagggatgtccactcgaggacacatggagaagaccccatctagaagccaaggagagaggcctcgggaggcaccagccctgctggaaccttgatctcagcctccagcccccagcactctgggagaatgcatttttgttgtctgagccacccacccagtgtgtggttctttgttatggcagctggaacgaactaatccaatatgcctagtcacccaggtattgccctagggacagaaaattcaccaacaccctctctatgcactctatgaagagaccggacttttaaaatgttttaaatgccttattcacaacatctcatgatatttttgttttcctcttttaattgctctaatctaattaatgagtttcccctaagcaaagagttctcactttattgttactttttgtcttttcactacacgtatgcaacatttgatcttatttgctatttgtttttaagaacttttctttttttaaaaaagtttatttatttaatttttattgagatgaagtctcgctatgttacccaggctggtcttgaatgcctgagcttaagtgatcctcctgcctcagtctcccaaagtgctgggattacaggtgtgagccaccgtacccagcctaaaaactttcttttcatttggaaataattttagaaacacagagagttacaacgatagtccagagagctcctgtagattctatccctgctttcgcctaatgttcactcttgattattttttagtttcaaatgtaatccatgttgcttggagaaagcatggaaaatattggaaatgaagtggatttttaaaaaaaaatcagtttaatattagcactaagacataaatccagttacctttaggaatctttctttgcagcatttttttcttttacttttcctttgaaataattatcagattacaggaagtggcaaggagagcagacagggctctcatgggcccttcacccagtttccctgcaacagctgccgctgatgtcaccatagcgctaactgacaccaggaaatgggtattgtacgatgtgtgcacagttctccaccattcgatcgcacgtgtagattcatgaagccaccgcccagtccagggtgtcccatcacccagctatctctctcgggctcccccttgctggtctcctcccccgaaccatcctcaacccctagcaaccactcctttgttctccagtgccacacttggtcatttcgagacagtggtatatacagaatcaggcagaacgtgaccttttgggactggcctttttgcttagtgcaatgcccgtgacatcgggcaggtgggtgtgtgcagtagctcacctcttcctaccgctgtattccagacaccacggtgtgtttagccggtcacctggtgaaggacatctgggttggctgtgtccggtttggggctgttataaataaagatgcatgaacactcgtgtgcccttttcggtgtgatcagaagtttttatttcctagggataaatgcccaagagtacaattgctgggtcatggtaatagacttagtttttaaagaaactgccaaagcctggcctaccatccttcccttcccagtgcacccacaggaggtgtcattttacattcccagaagcaggatatgagtctgttctgtaatgcacagatactactgatattattttgcttgcgatcaaattgtacctgctgttttataatgggcttgtgtcccttgatatgatcttatgagcatttctcacacgtattttcctacagctcctttaaaattgctgaataaggcagcacgtgggtaaacagccccagggcccagtcccacagggcttacttaagcgcgtgtccactccatggccgcacccgtgcatctgctgcggaacctggcgggcacaatgctaggggtggggctggagtcaccgagacttggtcctgctccatgggacttagagctggtccacagatgaacacgttgatcacagaccaggagtgctgtgggcgagactacacagagtcccgagtataagccgtgttaggtcagggagagtgcccacccatgtgatgtctgggctgaggtctggagaaaatgcaagcgttcaataggctggggcaggggagggctggctgtgcgcgctctatcttcgtcaaatctattttatctaatcatttgcaaaagcaaataacacgagctctctgtcccgggacaggcacacagctgttgactttgttcactgttttgtgcccctcacaagcatgaactgggcatgactcaggcatttgcagaaagaatgtcaaatgtcacccagaatatcactgtatacaagaggtctttgcacacagctccaatattttgcttagaggtcaatctctggaagttaaatggcttgttgctgaatgctgcatacatttccaaggtctagatactgttctaaaccttagtgactgctcatttacactctggaccctagacttcggcgagcaccctctctagatggccacaccatgagtgtctcaccagggctcaggggctgcctatccccttccctcctgagctgggcccccaaatcctaaggctgggtgtatatggccaagtgcagatggaggcaggctctgttttcaggagcaggacctgatccaagtttattaccaaattaaatactcctcccccctcctcatcgtagaccaaggcacaggatttgtttggagcttggggtggggagggaggtgaaatgatgggagggtttccacatggggtggagagggcagggtgctccactctgcagcttacagatagaggcaaaaatcaatagggcttgactttggtgtcccccttctggacctgcaggtggattcccaccaactgatcagccttgccagggctttctgggagcctgtctggtgggaaggagctcccacagcagtggtgatggagaaggtcccagctctacagatcctaggcccatgagatggatagagatggtacagagagagggaaaggcccagaagcctctgaaggacagcagggcacagtctgccatctcacctggcaggggcccaggtacctgagcaccgagaggcaggtttgcactcggcacctgtctctaagactctcccaacacacttacctttgtctttgcacactggccctgggcagtgtggcaaggtggttctgcatgaacacaggcttatagtatcgtggtcatcaaagatggccctaccaattctccctccccagcacaactgcatactgcccctcacaccgagagacagagtgtaaatccctgatcctggattccccattaatggctttgactaaaacaatgcagcagaagtgacatcctgagatttccacacccagatcttaagaaaactaggcttccacttcctgcagatgggaacctggctgccatactgtgagggagtccaagcagccacatggagaggcccagtcagtggaggaccaggcctcccaccagcagcccagctgagctgctgtaggagtgaggccatttgggaccttccaaccatccctgcacccagtggcactgtggaagcaggagaacccccaagtcaatctgttctggagtcgtttgttattgagcaatgaataactgtatcagaaattgatgtggcagtgttcttttaagaataacttaatttaggatttcagattttgctcatttataaggagcattcacccagtttccagaaatgattcaactagagcctggagacgtgggtcaccttcctcttggtgaagccagtgacacttctcagattgagtctgggccattttcaaagcaatagcatctggcaaaggcccagtggccagggcgtctcctccctggagacccgcctgatttcagtagctccttcctgacgctgttttggggccggtgtgagaggcccccatggctgccttgggagggtccccacaagctcaggcgggttgaggggggcggcttcctggcaatgaacttgaaccttcagatcagggagggtctcccttttcctctggagcaggccccactggaaaccttactgcagttgggacttccctgctggcccttggccctggagagggggtgtcctccctggtgggtcccattgtgtttgcagtttccaggcagtttctggcacactggccttggacccccaggctgggagccatggcgtgcacacaaaacgaccttcatctcctgcttctgcttggcaagctacccgggaggttttattttccactgaagttgcttcccgattatgggcatccctgtccattcaagacccttttcaaagccttgctaattgccccccagagccccacccgcatcccagcagcaagcccaggccagctgttcttttgatctcgaaaggcaaaagaggaagcggagaaaggctgtttgcaggccaactgtgcgcacaggtgtgagggagctgtccagcttccactccgtcatttccccatgagattggtctttctggcttaatcctcctcctgggccctcccctgtgcccccctctcagagctggatggtggccgccctgacagtcctcatcacacccggggctctcagatgggagcaggaagggctggcgccccagccacctcggcccctcttccagagggtaccacaagaacccagatggccacggctgtccctgtccaggcagcagtccgcgtacacaacgcactcccctgagtgtgatcccctcaaactcccacgacgcccacccgaggtgaatgctgctgttactcccgctttccagagaaaacaaactcagggaaggcacaaaatacattgcgactcacagccggccgctggcaggagccaaggtgctgctggggccacggtgcccacggcccgtgcccgggtgctgacactgtccccaccgccttcctcccggcggccatgaccccaatccacagcggtcaccggcaggggcagtggtggaccagggcctggctcagcctcactgtgccagggcccctcgccgtacagaaggaactgggacatcctcatagggtcggccggagtgtcacagtggacacaaggccccaggcagtgtccccctggaaagcacctccaagggctgctgtgacccccacaccacgtcctggaggaggggcagatccccccacaggagggacatggtctctcttcctaatccccggcatcaactctgattctttttaccgagagagacccgttcccaccctcctggggttggcctcactcagagaagagggcagaaggaaagtgagtgtgtgggaccctggaggccatggtgaacatgcccgtgagtcccctcaggccagggtcctcagccagggtcctcgggttctcgtttggacttgtttatgagcccccaaggcacacttattaggagtgagagcttgggcccccggcactctcagccaggcacctgccgtgaactgggcatcgccaggagccaccagacaggttcccaggctgtcaggaagggccttgatcagaggtgcaggggccgggcacttcatgcctgccctcctccctgcagcccaagctctagtcccaggtcagaggatttcttccagtgaccctccgggggcacaggagaggttgggcaggctggagctgggtgaatggtgcacagaacccttttggggaacagcggcccccaggaaggccgggcccaggcagcggtggctggcagatggccacttctagcatttggatgtgaggtgttggtaaatgagcccctgggagacattttttggaaaaaaaaaaaccacacctccatatgtcaagttgcacaagttttaggttgacctccctccgggaagggggtctgcccgaaggttcctcagactttgagcacattaccttccccccagaggccaaagtccctgccaggcaatgggagggctgtcaccacagagtcctcttagggagggccagggccactgatgggaccctccactcacagagtgtccacacccacccacccacaagggcccgccaggcgggagactcgtcaaagctccaggcacactaggctgcccagcccatggtgtccccatcacctgccgcctctggctggggtagagccttttagctatggccagacctgctctgcagattccaacaaggcctcatgtcccagcaacggtggcgtccctgccaaaggggacgggagctgagcaagggtcttcactccctcgtgccacccctccggcctctaggaaagtgctgatagcaaggccgaggacagcaaagccgagacagcaaggccgagacagcaaggccgagacagcaaggccgaggacagcgctccgggaatgaaagcgaagctccagtggttgctccaagacgtgggtctggtgggagcagagtgggctgtttttggagcttctcccctgcgatgtgaaggcaggagcaagggcagctgtcctgctcagctgaggcatgggatggccacagcatccctgcagagcccaccaggatgcactcagaactgacttgtcctgcacacacctacaccccctcacacacccacatccccacacctcttgccaaggaaaagccaggggacgtctcccaggttccgttcttggagtgggtggacttcccaacgtagcaggtccttgggtggaagacagggcctgtgacttagagcagaggtgcaagtcacagtggagctggccgctcccctaatacaaagaggtagaggatgtgggataacacgtgtttactgcagcttctccctcctccatttccttcctttcctccctcctccattccctccctgttctccctcctccattccctccctgtcctccctcctccattccctccctgtcccccctcctccattccctccctgtcctccctcctccattctctccctgttccctgtcccccatttccttcctttcctccctcctccattccctccctgtcccccctcctccattccctccctgtcctatttcttaatagactttgttttttatcgcaatcataggttcgcagtgacactgagtggaaggcacagagggttctcatacaccccgaccctccatgctcggcctcccccattaacctctgcggccacggtgggctgtgctgtggtgacgcacacgcccttaccaccccgagtccgtagtttacactggggttcattcttggtgttggacattctgtggatttcgacaaatgtacgacacgcacccaccattgtagtgtcgcacagacttcacggccctggaacccccgcgctgcacctgctcatttcttcctctctctttttaccatggtttacacagattccagatccaggggcacgaactggagttatcatccatggtcacagcacactctcacactggtccatgctcagctgtcgttttattattttattttattttatttatccttttttccaagacggagtcttgcccattgcctaggaatgcaatgggtgatctcagctcactacagactctgcctcctgggttcaagtgattctcctgcctcagcctcccaagtagctgggattacaggtgtgtggcaccatgcctggctaatatttttgtattttcagtagagacggggtttcaccatgttggccaggctggtcttgaactcctgacttcgtgatcagcctgccttggcctcccaaagtgctgagattacaggtgtgagcaaccgcacctggcctatattattattgtgattatatcatgaacactgggcaccaatgaccaacccaaaagctgaaatgtagtcacttctgtttgggtctgacctttcccatcccagcccctcctcctccatcagaggtaaccacaactccatccctggtgctggagtttgattttcagtcttatggtacaggggtgtttgtgtgtgtgtgtgtgtgtgtgtgtgtatacttaaatagtttggcttatttatgaaaatcataaaaaggatgtcgctcttcagcagctttctgagattggcttttcctgctcagtgtgatgctggtaagatttgttcgtattctgtctgcgctgtagttcattcagtgtcgtggttgtagaattttccactgtgtgatcctatcatgagtgatccgtccttctctcctctcactgtcgacgtgtgggctgctccggggcttcctcctgccaactgagctcctggcacgcctgcagggtctctcctgggtggagagctaagaataaaagctggatcttggaaatgcaaaatcctgacttgacaaggtgatgcctggcagtttctgcaaaatgcttgcatcgacttcatcgacttacactttgccagctgtgtgcaagggtgctgttgatccccatccttggaacatttagaattatcaaaaaactttaaattgttgtcaatcaaattcacgcaaaatcgtatgttgtcctgagttgtgtccctcaattaacagtgagaatgggcccctcttatcactcactggccatgtgtttttcctcttctgggaaatgcccgttcatgacctttgtccatttttctattgggtcatttgctttttcttattgacttgtaggagatatttgtacattctccacagtggtcttttcttaatttttttgtgtggtgaatcttgtcttctgggttgtagcttgtctctgtatcttctttaaggcgtagtttgatgaataaaagtcctaatttgaatgaagtcaactgtaacaatctttcctttcatattgttgatatttcgtgtgtcttgtataagaaatcccttcctactgtgaggtcacatagatacccacctatattttctcctataagttttaaatctttgcttttgacatttcgattcttaatctgtttggagatactttccgtatacggtgtggacacagaatctaatttttttttaatgtggtttttcagtcctatttatcaaacgactttccccagggacccacacaccacttccctatgtacaagcccatctgtgggtgggtgtatttctgggctctgtattctgcttcattaatcaatttgtttatcctgggccaataccacacatcacactgtattatagctgtatgattagccttttcaactgatggggcaactccacctccttctttttcttcttcaaatgtgttcagctgttccttttgaaaattgggtcgtaacttactcgtagtacagtgcacaagcctcaagggtacatttcaattactttctttacaaatgtgctcacttacaccgattacacgtgctgcataaacaacctctccaaaaccgagcagcatgacgtagcctttctgttgtgctcaggactctgtggacctggaggccagccaggcaggcaaggacagctcgcctctgcacagtgatttctgcgaagagttgaaggctgggcgtgacctgaagcctgggggtgcatgaagttggagcatcttttctcacatgtctgttggctgctgctggctgggatctctggggagctgtggctggaactcctacacatggcctctccttgtgttgcttcctcatggattggattgggcttcctcacaacatggcggctggattccttgatggagtgtcccaagagagctaggaggaggcacatgacatatttgtgatccagacttggaagtcacacagagttacttccatgatactcttggtcgaggagatcacaaaggtctcttcaggttcaaggggaagggatatagaccttgactctcaataggaggcttctcaaggtcacattggaaagagcttgtgggatgggagacatctatgcagtcatctttggaaaacacagcctgccatttctgtataacaggtgcccagatcaagatgtaaactatttccagggacccagtgggcccttgggggccccctccagtccataccagcccctcaaggtagttactaccctgatgtctgttggcatagactagttctgcctaatcttgaatataggcagaatagacaaatggagtcacgtggtgtgttgtgtactctttcttgagtggtttcttgcatgtcatagtgtgcctattgtcgagtgcagcagcatcttgttcttgttcactgctgtggactgttgtacggtgtgaacagatcacggattgcgcactcaatcttgacaggccactggccatttccagtgtttgattattatgaggaatgatgccacaagcattctcgtatgacttttttggtgtgtaaccacacactgctgttgggtgcacacccaggcgtggagctgctgggtcactggatgcccagcagacactagcaagggatgttttgaagtggtgggaccattttcacactcaccgatagtgtaagggggcctttcctctgcagctgttggtgggtagtgtgatctcacggtggcttgagttggcatgtccccaatgactgatgttgtcaagtgcttctcacctgtttcttggcctttgcataaactttttggggaggtgtttttgcaagcctttcactcgtttatttaaaattgggtggtcagttttcttcttattggtctgtgggaatttgtccatctggatgcaagtcttttgttggatattacctggaatcagccaaactcaagttcagggacacagttctccaaagactttcctcatttcagatgccagttgcaaatttgggggttcccagggtcaccttcacttcttaccagtgggctgcagatgtggagtccccatggactccctcctgttcgataattcactggaacaacttacagagcttaggagagccctgtgcctgtgaggacagcagacactcattgtagtagaaggatacaagtcagggtagccaaaggcagcggtgcagaggatgaggtctggggagctgagcaaccagcttctgctgtccccagggcacgctaccctcccgacacatggatatgggacaatattctttgagtgttgtcatttggggatttcactaaggttttggtgtccagttttttatcggggttttattgcataggcgtccccatagctaaactcaggctccggacccctacgcacaccagagaccaggctgatgtcaactggtgcaaagtcccaaccctctaatcacgttctgggtcctcctcgggaggccagcccccacccagaatcacctcatcggcataaactacctaggggccctccatgagtcacctcattagaagaaattatcaaaggtggccggaagggcccctggtccctctcagcctccctgttgcccccaggagctccagcggcctctccccaaaccctgccctgtggtcagagatcaccgtcagtcatgtcgtcagccccagctagtgggggcacccaccctggtctccaggggtcacaccagtggctgcgcttcctgagccaaccacgtgtgtcattgacctgcatgttacgaggttgggaggggttgggggaacaggctgatgtgtggaaccagccggactcatgtcaaaagccctttcccctccccacgcctggcacctgcatcactgtctcctccaggcatgccagggaggggccgtccccattgcccacatgcagatatcgtgcaaggcaggcatccctctccaccctggccatccctcgacagccatgggcattggcaaggcagccgctgtggctttactctgccggggccctgggcagccttgtgcagttcgacgccggccctccttctaccgcctgggggtttgggctcccagacctcctctgctgtaaacaccagacctcagatcatgacttgtggaagcagagggcccagatgcctcatgaaggcctgggagggggctggcaccctggactgggctcggggcctgagcagggcatgggcaggctctgcattcggccctgcctcccttttcccaggcgactgaccactcctgaggaccatggggctgtatcctggctgaggggactgcaggctccagggccaggatgcaggagcctggtgccacctccacaccaatgcccttgcacgccgaccctggcattgcccgctgccggtggtcaggtgtggaggaggcacgggaggggccgagtacggccaggctcctccctgggtgctgtggctgccccacactgggggcctgaccctgtcggggaaagattcctgtctggcattggctgtgctgagacatcagaggccagagctggagattttggcagtggggaatcttaaggaaacaggcacttctctttggaaaaagcacaaggattgcccactgccagagacagagtggcagtttttggtcaatcaccaacactggtagatgagctgtggatacgaggggctgtgcccagagaggtctgaggccacggcccagggggccaggccgggcttcaggaggctctgtctctgggtagaagcacgcatggacacacacacacacagtgatacacacattcacaccgacacacatgatcacatacccacacacatcattcacccacacccatgcacacataccctcgcacaccgcctcctacacccacatgtgcaccctcgcacaccgtgccatacacgcaggtgcacaccctcgcacaccgcccccgtacacgcaggcgcacaccctcgcacaccgccccatacacacacgtgtgcacccttgcacatcatcccatacacgcacacgcgcaccctcgcacaccgcctcatgcacacgtgcaccctcccacaccgcctcatgcatacgtgcaccctcacacaccgccctatacacgcacgcacgcaccctcccacaccgcctcatgcacacgcacaccctcccacactgcctcatacatgcatgcgtgcagcctcgcagtgtctcatacacacaagtgcactctcccacaccgcctcatacacacaagtgcaccctcgcacaccgccccatacatgcacatgcacactctcacacaccgcctcataagcacatgtgtgcaccctcgcacaccgcctcatacatgcacgcgtgcaccctccgacaccgcctcatacacgcacgcgtgcatttacagacacacttgtgcgttctcacagcgtggcacgcagtcacgctgacacacccccatgggccgatcacacacacttcactgacagttgtgcacacacactctcacgcggcagtactgtgcactcccacacccccaggcaaggggccttccaaacccgctccagcccctagggacgaggccagcagccccagggaagcaaactcaggggctctttgcctttctcttccccgagcccctctgctcttctctccagcctcagaaccaggcacaggggcagatgcggtgctcccagctggagggcagccaggcagtgtggacgcggagcctgtcttatcaccagcttcagctgaggcctgctgcttgtccagtgtcctcagagcccggcagggagagagcgggaaggtctcacgtcccacagctgggcttgggaggcagaatccctctgtgtcctgagctttaggttcccccgagatgacacggagcttgggctgcccagggctggatgctgttcctcccgctcagggccccagcctttccccaggagctcgactacgccactgtgatggcagctgggggcactggacggctgagcagctccaattagctgagtcctccctacggtcagcccccaaggaagctcgctggcccggccacctcaggagctgcacttgtcacctgcagatggaggctcagggaagaagttgcccctgggcctgcagtgcccgtgcacaccggcatgacctctttcctcacacttgactctcggggcctgaggtcgcaccaccgagggtctgtttgttatgatttcaaaagttctctccaacaattccacctcgctggggggagctgttatttaaactcttgagatgtatttacttttggcccaaggtcaggtgatgatggttttccacggaagcgagcgccaggcccatctgtttagacaagtgtgtatggcgggtggggccgtggggctggtccgggacgttcagtccaaaccgccagggagcggacggcccaggaaaatatccgtaaaccccgagagatgcttattgttctctcacataaaaaaatttggaggcagggatgcccagcctggtgtgccatttagtgacattgggggcgggcttctggtactttgctgtgctcccaacctagatcatgactaagatgtcaccctaaggcctgaaatggctctgggactccagccactggaaacgacactggctgctccgacacccccagcccccctccatctccccgcttcctcctacgctagctctcacgctgttattatttatttatttatttatttttgagatggagtctcactctgttgtccaggagtgcagtggcacaatcttggttcactgcaacctccgcctcccaggttcaagtgattctcctgcctcaacctcccgagcagctgggattacaggtgggcgccaccacgctcggctatttttttgtgtttttagtagagatgggatttcaccatgttggccaggctggtctcaaactcctggcctcatgcaatcctcctgcctcagtagtagtagttgggattacaggtgtgagctgccatgcccagctgcaggtgcggaagctgggggcctcagagactgtggactcctggccggtgaggagcggcatgggccgggagagctgactcttcagcgggactgaggtggctggagcgtgaccctttcctgagggcaaacagggagggccttggagcccggcgctcaggacaggcccctgctggcccggcagcctgagcttccacacttttccagggcgtctcgagttcgcccacagagctgttgtttcaggataaaaaatgcccttgtattccacgttccagttcagaggcccgtctgttcccaagagcggaggcgtcagccgcatgagtcccaccggaagccgggttgccgggtccccgtccctgccctgcagacgacgcattccggagcccccttgggaagctgcctggctctcccaggcctggctgccttcgcacgagggctccgaggcatgctcatcctacgtgactgcccgagtgtgcacacgcctggccgtgtgtgggcgtgtgcctggggcccgagctcaggagcaaggcctgcgtggacctgttgtctgaaacaagccagtagacagctgcgtcaatgcaggcaagctgaacagggctgctttttcagcctgacaaccccaggggctgaacaggagctgggggaggagcaaggggccgttcccctgccccacagcacagcacacgaccccgccttggaacctggggcccggggtgaatcgagggtcctggagcaagaggggctgctccacaggagagcctgtcccgccacccctcagccaccagattcggggctgctggacttgttctcaaacctgcacagtgagtgacagctgctgagacggaggtctcaggcagtgcaggtgaatcagcatggaccatggcgagcccgccttcatccttctcctgggaggactcgttccttagaagcgaacgggggcctcctcaccagggaaataaaaaccaagcaaggggaaagcacggaatgtgtggagcttcctgggagccttcttctgaggctgaaagtggctccctgcctgagttggtccatgcgggaatcacagggagatggtggctgggcctgtcaggacctttcagcccacctggtggacgggggtccatgagggtggtgggggtgcaggcggggtacacctggtgatgcagacacaggccccttcagtcagctgttgtcacgctagtgctgtgtaacacacactcctgatggaaacactgaaataaccgcctatggttcctgctcaccagctacagctgctgcacgtgccctgctcagctcccagctcagctccgggctgcaggtgggctgcagctccgatcctcgtcctcatctccgttggcccatgggctggcgaggacacacggccacagtgacacagagcaccaggggccgacctggctgcacccacacaccccagcactgcttgtaccaagtccaccgacacccacaggcccgagcaagtcacatagcaaagcgcaaggcccagggctccggaagcctccctgaggctacagcacaccccacctgcccctgaggctgaggggcaaggccaaggagaggggctgcctctgagtgggccctccatgctggccaatgagtcagaaaggaggaccgtacaccttgccagtgggaagatgccgcgctctgcctttgcgctgctctgtacctcagcgtccctccagctaactcaggagacacatcctggctttccctccacctatttggaaagggagctcgctgggccagccaggaaaacgcagtgggatttgattctgcgcagccccgtcctgggggtgccccaggaagaagtgctgtgccagcactgaccgaccagttctagactcagcctggcttctgcgtccactcaagggagatgggtttgtgtcggcagagagggcctctccctaggttaccttaccttgctctgttttgggggatccctcacctggctctgttttgggggatccctcacctggctctgttttggatgcagagcccttgatgaggtgggttgtttgaggggtggacctggggatttgacccaaacttcctaatccgccagagccctcgttgactcagcagcctccacccccaggcttctctgtgcaggcagagcccggcccggcctggagagctcaggacagcgcggcttcgggccggccctgcaggagtgccgggtgggtgttttgtgtgtccccatctctgcctgtatcaaccctaaaacatacatcatgtgtacttgatccccgttctcctcatttcctgcaacactattgtgtggacgccatttaggggctgctgacggtaactcacgtggccgtggctatccctgagctgctctgggacttcctgggtcagtcagtgtgggagctgaccaaactctgaggagcttagtgtcatactaattttgccattgaccccgttgtggaccccatcctctccccaaacaggagagaattttgcctggagaattctgaagctcgcctcgaggtttccgtcagccccctcttgaccccggagctgcccaaggacacgagcctggagacacgtgtctgatgttccgcagtgactgctgcatgctggagtctgatgtggcgggacaggcccggcgtatgcttggcgccacggtgtcctttctcagccactcggcactggcaggcagggtgtttggaacagcattgcagatgggtgtcaatgataaggtgaggctcctatcacgggcagcgattattcagcaggggacccgtggctgctctgccttgtgttggaaaagctctcatggcctcagtttcttcctctggaactgatgcaggacagtgagccccaaagctggggcttagcccaggaaggttcttgggttcactagggaggaattccagagcgagcgggaggtggaaggaaacagcttcactgaggtggccgtgtcacagctccgtgactgtgcctgcagggcagagcccctcccccagccccgcagcatggggagcagctgctcagggacaggcctgcagtcatatttatacccgtttttaaccatatgaaaattaaggggtgagttattcagaaatgtctagaaaaaaggaggcaacttcttggtcattgccatggaaaggggtggtaacttctgggtgtggccatggccctggcgggcgtgtcttatggagaggtgctcctgactccttcctgtttcaacagtcctcaatctggtccggagtcaagtcccacctcctacctccatggtttctacctgaaaaagcactgagaagactccgcaggtgaacgtgcaaatctggggtgcaggggaactcgtagggggatacaggctgaactatgtcccgcataaatgatatgtcgaagccctaaccctcagaacgtgaccttatttggataaggtctttaaagagatgagttaaaaggaggcgtgaggttgggccctaactcagcatggctggtgtccttataaagagaggacaggtggacagagacaggcacagaggggcgcccatgaggacgcggggagaagacggtcacctgaaagccaaggggaggagctcagaggaactggccctgccacgccttgaccttggatttcggcctccagaacaagagaagatccgcgtctgctgctggagcctccggctggggtcctttgtggtggccaccccggtgaactcacacaggacgtgtgaactcacacaggacacgcaaaagtttccccagtgtctcctctggaacttcctggtgttttgaagaaggcactccatttctgaagggcactggcagcatatttctgtgtttagaacttttcccatgcatatttttgaacaagtattttaggaagataaatatcagcacgttttgctgctgttgagagggtctgtggggtctgtttagaaaatacgtgatggttctgaccacagagccccgggcatcaccggccacaccgttgcccccgggaggggtcagcagagcccccgtggtccagacaggcagagcctctgtgtccggggtggctgtgggtcctcaggacgcctgcccggcttgagtgtgtctgttgcttagcttgtttgggggcagaattaacccagtgccttcgccaattctatttgtttttgtccgggagttggtgattagtgcaaacatcaaggacacatgttttgagggccttatgtgccaaggggcagacagagggcttgtgtgttcggtgggggtcaggaccttgtcactgagcttccctgaccctggaagcccagggtggccgcctgcttcccccatgggctgctgagtgaaatgggggttcctgaggagcagtgacggggaggtccacccaggtcgctgggccatgtggtgagagcctgcaggtggcaccggacacgcctgggtcgcccctgccattgtggggctcccgctacccagctgctgacagagccactgctttccccgggtatagcgcatgtggagggtggaatcccacgtgtgggtccagtgcccacatgtcctgacctcaggagcacacgatggtcttgggccccgcagcatccaagagacacctggataagggccaggaggtgcatggcacgggctccctgggaggcactcggttttcattatttactattgaaaactaagagcagccaggtggaacctggagctcccaccgcagtggacttcgtggcattctctgcagcatcacgtggcctggggcagggagcccagctcgcctcctgccctgctcggccccgggcttgcagccacagcgcccctctgatctcggccttcggctgcgcgtggctctcccttgtgtgtctgtgtctctcttctcatggggacaccagtcacatcgggtcagggtttatcctattctagtggaagctcgtcttaatttaactatttccatctgcaaagacccgattttcaagtaaggtcacgttcgctggtgccagggtcacggcacccacatattttttgggggggacacaggggacctgtaacagatggcaaggcagcccctccctttaggagcaggacttggccgaagtgcaagggtgggccatgaggatgtggacgcaccgccccgaccagtgaccatgggggtttgtgggagctgtttctcaccggcaggccctgggaacgtaaatgcaggctgtctgggaggtcgccagggctgccccctctgcatcttcctgcgggcaaaggacatttgcagccacggtgctggggagccaaggagatgccgcgatgcagccaccctgggccctgcagtggtgcagatgaaccaccttgtgagcaagtgaagaggggatgggtgagcccacccacagcaaggggagaaggaagtccccactcacgcggacaccgagagatcctgcccagtcaccactgcaaggccaggagtggggacctgcagtgcccgggtccctgtccagtccgtagggcagctggaggggggtggggcagggaaactgtcaaagtacagcagtacaaacctggccagagcccactgtgcgaatgcccattgggacttcgtgggcctcgggggcctgaggctcagtggaagagaattaagacttttctcaaagtagaaaaggaagaggagaattcctttcctttccctcctccagggggtggaggcataaagggacccccaggcaggcacagcccgggggccacgcatgcacccttcattcctccactggctgacagtgtgtgcatgagcgtggatggagcgagtgctgccctccgtgtaggggagccctcccaagagcaccccacaagccagggagccccaagcagcccccagcgggtctgggatccggtcctgggtaagcgtactgtgtctcctagagcattttttaggggtggccggagggacaggcatggggaagaagtgagcctgttctcggagctaccccccatcatccagaggcatacaggacaaggcgcccctcctccctccaccagccccacccagaagcccctgaaggcagcatcaggcaccccaaggatgaggttggctgctgaatctccagcggtgacagcttggtcttccagcaaaatctccaggtcccaaggagttccagcagtatcctgagaccccctaatgcagcgtgcctgccctcgcccatgatggcctggttgtcaaagggcgaggccagcccagcatcacccacagcagtgcatccatggaaacacactcctggggaattaaagacgggtgtcacgtgctcccagtcgggccaggatggaaagggtcttctcatctttccagttggtgcaatgacagccaatttcgacatgagcaggtgcgcaggaagcaagggcagcaccggcccaggagggcctggtgatgtgtacggttattattggaagtgtgatggcagtcgggagtgcagggccatgagtcacacccaaggtgaccttgagtcatgcatctgcccggctcttgggcctcgggctaaccagctccccgcctcctctccacacaggagaccacagagaggttttccgagcctggctgcgggtggggcagccccaccaagtgtctggggccagcggctccccagtgttctcctaagcctgtaacttccctggggatccctgggactcgctgtctcagacagagcctcacccacctcggagctggttctcctgataccacagggcccaagggtatcgtggctgccagggtggggcaggaccagaaactgaactggctgtactcaagaatgcaaatggcgtgagaatagggaagggtgccggccacagtgacactggcagctgcgtcctgcccacacagctggcatgggaattccccacctggagcacacgctgctcatgtcttagttgaggaagggataaggggctaaggagggggtgtccctgaccaatgggacctggggtctaacctgacccacaggatggctgctctgtccaccccagccctgtggacatctcttgcccacccagccatggcaaaaatgaggagcccccgaccatggtgaccctgtctgccagccccaaatttgggactcagagttggacaggccagagtgcggaggaacaccagccccctggaagccccctggaatacgaagccgtcaccgctgagatcatccctaagtgcctgctgatcacccctccctcctccagacggaaggaaatcctacaaaggaaacacacgtatcagactttctacacctcccagctagactctctttcaccatgggctaacaccacagaatgaccttacaggttctagaaacatggacatccgccccagggctttgattggggaacggagcccctgcttttctagagtgaattttttgagcagcttgcaacctctgtcagtaatttgtctcttattctggagggtgccaggcaggaggagacggtgggcttcctgctgatccaggcccaccctttgcggataagatgaggccttccctgctagtgggagccaggcctatggggcggggacagcctgggccctcccagggagtgtagaggaggaggatgtgctggaaggatggcaccccagcccggaaggacccccgcccaggacagccaggcctcttgccacaggggacacttatgccccacacagaaagcaccccgtttctcagggcttctcatgggcaaagtaaccccagagaccctggaatgaaactcatgcgtctgtgaaataagaccaggattaagcatctgatgagattgtgttggtggaaaaggtcggtaaagagggtgtgagcttggtgctgccctggtgaaggaaaaacctacccagaattactgtgggtcacataggccgggtgagcaaagccagaggcttttccagaccccctctggctgggtctccttggagggcgagtggatgggaggggcagggaggcctgcagggattgcctccaagtgagaagcttggccaggccgcagatccaggcagctggtgttttactttacttatctcttctctccttttttttttctgtttagttttttctaacacttttctgtctactttcaacaagttaaagaactttttgttttatttatttatttattttcctgtggtaaaatatgcataagataaaatttgccatttcagccatttttaggtgcacggttcagtggcatgaagcatatccacattgttgtcagtcatcaccaccacgcatccccagaacgttccatcctcccaaactgaaaccccatccccattgaacactccctccccatgcccctcctcggtccccagcactcaccgttccacctccggtctctacgaaccagactccgccagggacctcatacaggtggaaccacccggtgtcagtccctgtgtacctggcttatttcactcagcatcatgttctcaaggtcggtccttgctgtggtgtgtgtcaggatgtcactcagcatcatgttctcaaggtctgtccatgttgtggcgtgtgtcaggatgtcactcggcatcatgttgtcaaggttggtccttgctgtggcgtgtgtcacgatgtccttgctttctgaggccagatcctatttggcatgcatagaccatcttttgcctgctcacgcctctgtccatgggcccttgagtggcttccatctgtcggctgctgtgaataaacctgctgtgaacatgggtgtacaaatatctctttgaatctctgctttcaattcttttgggtatatacccagagaagaaattgctggatcacgtggtaattcgatgtttaactgttttgaggagctgccatacttcacaagtttttgaaggtttagggtttctttgggagtttccgttatattttttttaatagtgtcacagaactaattttgatgaaaaacactcattctctatcttctcattctgggggaataaattagtgtgatttgaatataatgtaattgcatgcaaatccagccacaaaaccgggcgctgcgcactggcagagggtcaggagttgtgccaccttgctagggaggaaggagggtgtgtttccatgatatgccagcggtcggtcctcttaaaagggtgtgtattctcttgctgactgtttagaattggcaagatgtggtaataatagttggttttactatcatttttagattctttacaggcatcacactccctgattgtcttgttccctcctattacactacacacctgctataccactgatcatagctatagatgcctaggactgtaactgatacaacaacaaagctacaaatggctccaggcccggatagtttcacaggccattccaccacactgttaaggaacagataatatttaaatggatgcaaagcataaataaggaaagaaaatttctaaattctctttatgaagctaccataagaatgatgccaaaacccaaagagacaagcacagaaagaaaatcataagccaatcttatgaatgaacaccaacacaaaaatgtgaattaaattgtctaaaaactgtaagccatgacctaggagacttgaagatggtttgatattaggaaatatcttaaaataggtcttcacattcatagagcctataaaattgcagtagttgggacatggaccccctagtcggacagcaaagaaattaggcagaggaaccaaaaatggatccaaacacacccacctagttaggacataggagaggtgatttttgcctatcagtgtgatgaattccagttgttcagaagacaccaactgaattacaactaaatagttttctagaaaaaaataaaattgcatttctactttattccctaaggcctccatatgttacagctacagcagatatttttataaagttggaaaccataaacatactagaagaaaacagagagccatttcctttactagttttagaaggagaagatcttctgaaatagaacacaaactcagaagccataaacatggattaaaagaaataataataaagttaaaaatgtttgcctggtgaaaaacacaaccaccataaacaaagacaggtgagaaatgaaatagtatctgcaatgcaaggcacaggaaaagcttcatttggttcatacataaagaagttctagaaatcaatgcaatgaagaccaacaaagtgatagaaaatgggcgaagtacaaaaacagttcacaaaacagaaatgtgaaggctgttaaacatatggaaagatacacacactaatgggaaaaaagaaagaatgcaagttaaaatcagaatgtaagactgtttttaatctatccgacagccaaagacaaaagcatgagaaccctctgtcagtgaggagtaggagagaggctcctaaccgattactggtgtgagcaacttgtgatgccttctttgaaataggtatagaaacgtagagtgcacacacccagcagctctgcagataggtgcacacaagtgctaaataacatatgcacaagtctactgacacagctttacctgcaagttgtcaaaagctggaaactgctccaacatgcccagataagagtctggagaaataaatcatgctacacccagacagtgggattcgtgtcaggcagctgttaaaaagcgggaggtggctttatgtgcagcaatgcacaaattactgcttaaagcaggaagccaggtgcagcatgcagaacactccctgggcagcagcacctctggagaggtgcgtgagtgcctggggctgccataaccaagcaccacaaaccgcctggcttaaaacctatcctctcacagtgctggggccagaagtccaaagtcacagtggcagctgcaccacgcctcctctgaggcctcccagggagaacccgttgcttattccagctcctggtggctccaggtggcctctgcctccatcttcacatgactcctccctgtgtgtatcttctccccctctcttctaagaacactgtcattggatccgggcccgctccaattcaggatgacctcaccagaaggtccttaatgacatctgcacagatcttttttccaaattcagtcacatttataggttctgggtggatgcatcttttaggggctcactattgtctccctaaaagaaagaagcggaggcaaaattaatctaagtggagagtttatttgggccaagcttgaggattgcaatagattccatttgccctggatctacactctgatgagcagcagttcacgtggcttgtaaaggaaagtgggggtcagggagtcggctgataccaagttttctatcaggaattctcattagtttacagaaatagcattgatgagtgattggctgtatgttgttaagatatagggtgtgggttacggtgtccagtggggcattactgggttaatccgtagctacttgtggcaacaggaagcagtttccagacatgaacacacagctcaaagcagggagcagggtgtgaccactgtctcattttaaggtctctctgcgcctgataattaaaagcactcacattccacaggcaaaactttttttctcaccatttaaaccattactgctggaaacagaggtaaggaagagatcatggcctgccctctgagattttataccatgcctggaatgacctattatcaaaataagtagctggagctattccatggcaatgaggaggtctgtgcataaactgtctcccagtggaggaccggccacacccacaccctcccatgctaaggacgggcccagagcccttgaggggcaccttgaccccccaacaccactctggagctgggcttcctgtctgcttgctgctcttatatcataagtagagagatcatctctttctctctctctctctgtctatatatatatatataaattaaatctcttatttctaacagtgcaaaattctttattaatgccaacatttttccactttatggtaactcactcatctattattttagttggccgccccactccataaacacacacacacaggcgcgctggccaggtgaggaaaccacagggcagtagcaggtgtggggacaggcacccagtaggtggggcaggtgccctcctccctccgtaacaggcgggtccaggaacagctatgcttttctggctcccactcaactcccccacccccagcattcccagcaaagggcttctcccttccccatggggccccacagatttgcatgtgagtgacccaaagctaggtcagtcataggcaaacgggtctatgcaaatattctgtgttagccagattgcttctgcgaactcagggttttctggtgtagccatctccttcctgggccttctgtgaactcagggttttctggtgtagccatctccttcctgggccttctgtgaactcagggttttctggtgtagccatctccttcctgggccctttggtctgctctccatttgtcctgagaataaaccctgctgccccaccccccaccccagtgcccacccccgcccccagcacctcctcctgattcaccgaagtcagggttgcacaaaatccttcacctgtgaacctgcgtccttaaacgtgcagcctgggatgtggaggggaacctggggaggtttacacattttcccagccagacccgcagtatcagtggttctcaaccaggggtggtctagacccggggacttccggtgaggtctgcacacagtctgggttgccacacttaggaggggaggggcaccattcagcattctgcagtgcacaggacagcccctgccagaaggaattttccagccccaaatgtgagcggcatgagccagggcctgagtgtcggggctgatggtaaagatatccccggcagagagggttaaattcttccaggggagttcagagggtcctgtgcttctctgtgaggagcgtgtcccccttcgaggcaaccctcctaggagacaggcgggggtccgttcttgttgatcatctcacagagctggagaactacagttatcctggaggccagattggaggcctctctccacccaggccgtggtccggctcacctgctgcccagggagggtgctcacatgcacgcccttggagcctgttccgccgggaccctttgccccacagtgaccccgtctgggttttccttgcccttctctggactcagtggtcccagcccctctgaacttcccctgttatcttcttgggacttaccagttccattctgagtcccacattgtggctggggagactcgtattgggtggagcttcaaagctggtgtgaccctgggacagaggaaggctctggggactttgcagttacggagacagccagaaagccacagtcccttctctctacacactgcggtggaagacatggcccttcctgccaacgtgcacctcccctgggctcctgcaacatcaggggtggtgaaggcacccccctccaggaaccctggcctggtggcctcagggcacgggggcttctgggagccagaatccgcagaccctgacggccccagagtggggaggccctgctgggcccggagattcttacagaccccggagggaacaagaaggcttctggggcctcaagttaggtcttccttctcctggtgtctgaggcttctagaacattccaaaaacaagacagccacagaagctggtggtcttgattggtgtggactttgagagtgtggcaggatagcaaatccttctggcttttgtgtcctcctgtaatactcttctttgtgcaatttcttattgttggcaggaaatctctttttctcatgaaaaaacattgcctcccccgtggggttccgctgtggggaggccccttcagaaggtcggcaggaggaggaggcgaggtggggctgcccaaggccactgttgagggtcccccacccctgtccctggttggcactgcactggggtattggtcatacagtgggggggcacctcccggatcgtggcgggggcgggagatagaggctcgtagggtggcagagccacaggcacagcacacagagatgccctggaggggctctggagagaggggccagagttgtttttaaaaacacgtacaggccgggtgcggtggctcacgcctgtaatcacctgtaatcccagcaggccgggtgcggtggctacgcctgtaatcccagcaggccgggtgcggtggctcacgcctgtaatcccagcactttgggaggccaagttaggtggatcacctgtggtcgggagtccgagaccagcctgaccaacatggagaaaccccgtctctactaaaaatacaaaattagcctggtgtggtggctcacgcctgtaatcccagctactcgggaggctgaggcaggagaattgcttgaacccaggaggcggaggttgcagtgagccgagatcacgccattgcactccagcctgggcaacaagagcaaaactctgtctcaaaagaaaaaaacataaaataaaaacaaaaacaaaacaaaaacaacaacaacaaaaaaccacacaaataattttcgttgctgattataaaaaagagctgagttttggagtcagataagagtgttctagtggcaggaagagggcagcacttgcgggaaggcaggcgctttccgacagcagggtgtgtgaggggaacacagcagggcaggtggctgcagcctgggtgagcagggtcctgcgacccacccaagggggctcctgagtgagggtccccagccactgccagaaggcgcctgaggctaacggtgtggaggacgcctggggaggagggagactgggagggatgcgccttggagagaagcacccccttgaagagctgcaggggcccctgtgggcagcggacaggcagccaggagggaggctggcaggaggggcagaaaatgggctggagctcggcaggcggctagtgagggatgggggccctgatggtgcctcccacatttctcttgggggacttagcgtgtgccctggctttttagcttgggttgtgacaccattcaccatgcctggaatttgagggcaggacaggagtgcggggtgggggccgagggacctcagctgtggaggttgggacgctgcaggctgcccagagactgtggggaggcttttgggacttcgaagctatggggaagtctaagcaagtttacacttgtgtgtggccgtggggagaccgaggctgagggctggtgcccatcctgcaggtgcaaggttaacctctccctgctcacaggggcctggcagcctcggcacccagggacgatggcccagccgccccagggaccactgactgccggcgggctgggcgcatgctcatgagagcagttactttgtgcatctgcgcgagaaccacaagatgggatttattggttccatttcagtaggaggaaactgaggctcagagaggcttcgcacttcccctgcttgtgcttggaggtggagggcgcaggattccaggagggactggccggcccctcccactgaggttttcaccatctgcccctaccccgggcaagacatctgccttgggagtggggtctgggctggggccggtggagctgagagagtaatgagcagctcccaacgcagaaggagaaatgcgtgaaaacatggagccccagttgtccccgaagtggtggagggtgtcgggggtgtcggaggggggcaaacccgctgaggcatggggagcaccagagaggtgggggagcgggagggggacactgcccaggatggcagaggcaccagagggggtctgaaacccttccaggcaagctcaggacccctgagtccagctgagtccccagcagctgcacagagctcagggcgggggccagcagccgtggagctggggggctgagggaacatctgcaaggacgtgctccacccaggcagacgccacaggacatctctggaccccatgcagccaggccaggaggcaggatccaggcatgcagcccctgggtgacagacacctgggcaccagggcgagaggcatcagagccaagggaacctcctggcagccactgccacctagacactcccgcaggtccctgaagggcctctgcgagggtgagtctgttctgcttggggtcacccatagagacaggcccacaaacgggcccacaaaagatatgttcacgtcaaatcctcggaatctttgaacatgaccttctttgggaaaatgggttttggagatgtaattaagttaaggatcttgagataaggtcatcctggattatctgcgtggactttacatctaacgacaggtgtccttcaagagacacagacacagaaaagaaggccatgatgatggaggcagagatcggagggcgcagccacaagccagggaaacctggtctcctccaccaggagctggaggagaccaggaagtattgtctacggccacgcattctgaatgtgctcagtttcgcctaatcttggtgaaaccaaggaaacatcctcccctggagccttcagagggagcacagccctgctggcatcttggatatcaggtctctagaactgcgagagaatcaatttctgttgttggttttgttttgttttgaagcaggatctcactctgtagcccaggctggagtgcaatggtgcaatcaccgctcactgcagcctctacctcccaggttaaagtgatcctcccacttcagcctcctgagttcctgggaccacaggcacacaccaccacgcctggttaatttgtgtgtacgtgtagtttttgtagagatggggtcttgctatcttgtccaggctggtctcaaactcctggactcatgccatccgcccgctttggcctccccatgcgctgggattacaggcgtgagccaccgcacccagccaatttcccttgtgttaagctgtgtgtgtgataatatgttagggtggcctcaggaaacgcccacctaacttgggaagatgagaacagggaaatctataccagcttgtgcgtgagaagtttcagacacaataattactcagatgttctttcatgggaaatcaaagcagaagacatccgaatgttcagggtttagatgtaggttctgtccctgaatgtactgcaaatcaaagacaaacgtggagggcgatctggcccagccagaacatcaggtcgttccttatgctgctctatcatcagctctccgtggagccaggtggctgcttgggcacttgagccagcaggaaagaggagaggatgaaggaaggacgtcgtctgccccagctgctgtaacacaccgtaggtggtggctcgagccgcaggcatttctttccccagctctagaggctggaagtctgagatctgggccggcgaggttgtattctggggagggctctcgaattggcttgcagatggtcattgtcttgttgtatcctcagatggcagagagagggagccctggtgcctcttcctcttctgaaagggcgctaatctcatcaaaagggccccctcatgacctcatctaaatctaattatctcccaaaagccccatctccaaatcatgccacatgggaagtttgggctccaatgtgaatttgcaggggacacagttcagtgcacagcagagggcatggtcctgcctgttaaggatgctttccggaggttgcacacaacacttctgcttaaaatttgggcaccaaaatttaggcacatggtcacagctggctgcgagggggaatgggaattgtatccagctaaaattaaggagttcatattatgacgtgctccgataagagtagggattcagactttccccatgtcccttcgttgcttcatgcctcttcacagtccttcatatcgatcctgccgtctcatggtccaacgtggctgcctgagtacctgtcatcacctctgcattccagccaatagactatgcctcacttagtcctgatgtagtgtgaggaatgcagtctcttatctgaatgcagtgtgtccagtgaaaagctggggttcttgttattcaggaagaaggatggaagggctgggggtagttagcagaattttgcccactgcccttattgccccaaggactctgggtaaaacactgacatgtaaactgccctcctgtttgatcattggctgctcagagtccatccctgcaaagcccacaccataagctccccaagtgcatgagtcacgacttttcttcttcttgctcctatagggtctaggctgacaccgggcaagtcccaggggggttagctgggcatgcgctggctaagctgaagatgggctgtaccgagccaaaccatgggatggggaagcagcgccagcagtggctgcctgacctccaggtaacccaccgtgcacccgatgctgggtgcctcccctgagcgctctcagcttaggctttctgcacctggcttccccaccagaaggactttccacccacaccctctgcaaggcttcagaactctttctaacaaaccccagggggagggagcgcgtttccccgcagccagacacgctcagtgacattctagagtcaagttcagcgcttggcaaaggcccattccataaaggacagatgcccggcctcgggaggttacaggaatggggagaagggtgacaggaccctcagcaagtctctgtgtccaggggtttccagccagcgtggcttgccatgctccaagctgggctcagaggctctggcttcccgaccctctgagagcatctctctgtacacacagagggggtgggggccagtcacatctgctccgggcgatgtgactcagctgtggacgatgacgacatgatcctgagcatgacagggtgggaagcttttcctccttctccagggcctgcgaaccctggaaatgcatccacgatgcaaatagcgacagacatcattagcggacgcatccattctgtttgagctggaaacgctcagggctgcaaggcccttttctgagaagagcggttcctgtcgtcatcctcctctgcaccgcagcgtctgattcccaggagggacagcccggcagttataaaaggctctttcatgacaggcctagaggaattagaaatataattttttcaggcgcttccaaaaaatcaagtaattagagctcatgcacgtaaaagggcccgccatgagatttgtggcttgttttttaaaggaatcaatttatatattaaaacaataaaatacatccggggagcacaagcctctctaatgctttcagtgtcttctcagtgtggttccagaaaactctgccccagaggaaaccaaggacagggttccctgggctgttcctgggggtttgtgggggctgctgggctggatgtaaagtcatgtgtgttctcaaggctggggaaaggacttcactgctgctgctgaccccagcaatgtgtccacttgaatcagctcagtgtaaaacagaaaaaaaaaagtgctcttgtcctttcaggtcctaatgtagagagtgaaatggcagaaaggattctatgttaaatttccagctcgtaaaaccagatgcaagtttatgcttgtacatggccatggggaggccaaggctgggagggtggggcccatcctgcaggtgcaaggttaactctccctgcccacaggggcctgcagcttcccctcccccaggtgatggtttgaatggtattccccacaaaagatgctgaagtccaacccccagtacctgtgagtgggaccttcactggaaacagagtcctggcagatcaggttaagatgaggtcacaggttggacccaacaagactggcgtctttaccaaaaggggcgattctgacacagaggggcatgtccagggaggacaaactgaagatacagggagaagacggccatctccaggaacatctcaggctgccagaagctggcagagatggggaccagaggctccctcacagccccaggaggagccagccctgaccacacctgcattgcagacttctggcctccagggccgtgaggtcagggatttctgaggttcaagccccccagtgtggtgctttgttacgtaggctgagctgactcatacaccccggctgatgaaatgcttcaccatcagtttcagttgtgagctggtcatctggccccaagagagcccaggcaccccagcccactacccaccctgggtttctgcccacgccaatggctcctgtgccaccatggccaggtagaggcacttcctccacccagccctgggtcacatgacaattccctgttctcactgtccccgtgaacccctcagggtcagcgcttccacagccctggcaaccctaggccactctgagtggcagaggctgcctagcgtttctgactctggagacccctctgttgaggatggggtcccctgggtcctggagcttccagcacccagtctcagctgaggccaccgcctgagctccttcctcccagaggctgagccggcctttggcccctgccctggcactgtgctggctgtgctctctgagctcatttttcttggtggaggccaggagttggcttcagggtacccttgtgttttctcctccaaggcctggggacatattcacaaatccctcccaggggcccttctgatgccttcatagtgagtcactgagggcccccaagcctggggcccaggccgggtgaaacagattgcccagcacctcccctcctccccttcactgccttgagagaggagcgtccttctcagctgtttctccacatagaggatggaggccaccaggcctcaccgtcctgagagccatcccaagagccatcccaggcactgcccttggaactggccatgtggctccagtgtggtttgaggcttcagaggattcgggcccatgaggccaggggaacacccagtgggaggcctgtccctccttcccgaccctcccctgaccacatctggcctctctttgggggcccttctgggtctgccctcctcttctggggcccaagggggggccttgggtggagctcagatgtgccccctgggaggcgcttgctgggcaacgccccttggggtgggagatggagctgggtgggcaaaaagggggtgcctgtgggtggggcctgcacctgcacgcttgcctcagcaggtgtgactcgggcaactgaccctggctgaggctcagggacccccaaaactttgctgtttgattggagacgttttcaaaacgagtccttggtggcaaccccaggccagctccacagggccccacgatctgtcttcagggtgcttccaaggcaggagctcaggccggtggggcaccctaaccctcgctggatgctcctgccaccctccctggtctgctccctcttgagaggggcatgggcttcgaaccatgggctatgagcctatccacataccttgttttccccactaaatggcagcgtttcttattgatgcccatggaaaccaccagggaggtggctctgccccctggctctactcaagggatcataatacatttcagagccaatcttatctccactactttataggagtcaaaaatacaatgttttcaagacaaggacagcccagcagacccacaaagtcgcagggcacagagctgcccagcaccctttctcccccagcccagcctgtgccggccgtgttgtcccgacaggcgccacacggaggccttcgcagttggaaatggtgctgtgtggcaagggcatctgggccggtgatgacagcagacagtggcgggggctcgcatggggacccaccactgcggctccacactgcaagcagagccctgggcccagccagaaaccaagcagaggccatgcagtgcggaggctgaatgttcttggagagtgtggccggcttcctcctctctccagacagcaagacccaggatgggcctggagttgtccgaggacacaaagctggtttgcggagggctggcctggggcgcagggctcctggtgcctggttcagagcctttcaacccccgtgttgccacacctgagccagtgcgacactcagctgcagtggccagactgtgagcccagggtcatcgcgaggcagacgccaagacaggatgaagggcaggaggatttcatcgggggatcaccagtgtgggaggaaatggggaggcagccaggaggctgggaaagctgtgggacagaagtacgagtctgactgccagggaggcggggaggggagggagcgaagtggtgggtgcaggctgtggggagccctggagatgtggctggggtagaggagtcccagtgagggacaggagtgtgtctggttctcagctgtgtccccagcaccttggacagtgcctggcacatagtacatgctcattgtaggtttgatgagcgagtgaatgaatgcatggctggcgatgggctagtggaggaaaggggagagacctgtgcgtgggaagggctcttggagccttctgccaaggagagtggagccccaaaggcagtacagagcgtctatgttctctccagaccgtgacccctcagccaccctgactcagccctatctgctccctgccatggaggtcttagacatgctatcccgggctgcagcctactaagcaggaccttgagagtgaatgtgctgcctgaagcacatggccagcctccttcggcgccagcccgctggccctgtttgcgggaaaatgccttctgtattgcttcgtaatggcctgctttgttcagccagctttgcacttgaagccagccagcttggcagccgaacggccacatgtcggtcattcaggcagcaggtcagcagtggaactgggtggcttccagctgcccgtgggagccggcctgagatgaacctcctccctccttctgagaagtggccgggcacacaggagtgcagcctggctgcattttcagtcatttcccaggttattttcctggctgcagtgacacaccagccacatgctgcccatgtgggcctgggtctccctgggcttaggaggagccccacaggtgctttatgaggacgggctggggagagtggaggaggcgtccccagcctgtccctgcgaggtgcccgggtcccggctgcagcctgcccatgtccccaggtgcctgcatggcagagccaggccacctgctgtgcatccgccaccttgtgctgggagggtggcactcagtggatgccagccatgcacccgcctcagcctccacattcactttgccacagggaaaaagggagcattgtgctggcccagtgaccccagacgtgctgacctactgggaggggcagtgggtctgccccgcatccgagtaaggcgggagctgctaaatgcacccatttgggctctgccccaaaacctcttgtgggagcctggagatctgcatttccacatagtttaggtaactcccagatgatggatgtgttgcgaggctgggaatccctacatcaccttcccagggacaagctgattgcaccctcagctccccatcccaggctctggctttgctggggccttgcggtttcagccccaggttcacgagcttggttccgacacccctcagcccctccctaagacctcttttgcctgctgagggagcaggcgggtctttcaaagcttcccccgaatgcctggggtcctctcctcttgtacttgcttgtgagtcattcaagcagctccagctccgtgctcaccgagtttcctgggcttccctagcaaagtgccccagaacgagtggcttaaaacaacagaaaggtattctctcccagctctggacaccagaagagcaagatcgaggcacaccctccctgaaggctgaggggtgtccctcctgcctcctgcagctcctggtggctctggtgctcttgggcttgttggccgcctctccccatctgtgcctctgtcttccctgagcaggggaagcactgccatcagccccatgtcacagacaaggaaacagacccagggcttccgcagccatacaccatgccgctgggggagaggctgctgggaccccacccctgccccccaggcctcctgctcccagagaagagagccccccccaccctggcagggaggagctgaagggtccctctctgagcactgtcaccccgcaggccgggccgccggggtctgactgcagcctcccgagtcactctcaggtcagggagacaccgcatgaccacgtccccgatgcgccttctggttggggtgaggctctgacaccgcggaagccaacagggttcagacatcccggttcctaatgttttgcaaggcctcaagccatgtttggggcatcctgtgtgtgtgagggccagcgagggctggcactgtacgctgcagctctgcacaaggagggctgaagttgctctctgtgcctggtgcaattctcagggtgcacatggggcaccccccaacccttggccctctcctgatcatctgcagacattctggtccagccaaaggaaccacctcccaagggcagaaccagcctccacgctggggtgactgcctgccccctgggtgggcagggctctcccagcccctcttgtccccagggaccaaagttgggtcagggcctggctgtgcatggcagggagctaacctctgcgtccaccagctctgagtcagccaagagccctgtgcccacaggaccttctggaagctgaggccaccacgtgcaggccagtctcctgggcgctggcctccgtctgcacatccctggcttcaaatgctacttttgccttctggtcaccactgcggttggtgctcacaggacttttcaacatggacaggcctgcattcagatcctgcctggtccttgcaccacatgtggccctggccaggtccccactctaggtcctctcatctgtaaagtgggtggtgcaaggagacagtccatggaaagcacccggcggggctcagagagaccaaaaatgtgatcccctatctaaagcgtctcttattcccagggacctaagcggaagaagccagtgcttaaccagaagagtgagattgaggtggaagaacccaggcactggctccccgggctggatccacctcgaggctcaccccaaggcatgcagtgagtggaaggctgggatccccaccatccatgggctctgctggacttgctggggctcagggctgggcgggcactcccaggactggccccctggcctgggcactgtcagggcccaaggggaacagacctcactcttcacccatggggctgggtatagaggagctgtttcatggttagagttcccaacacccagacaaatcccactggaagcctcagggtggggcccagaagctgcatgtgcagaggcccccaagccaccacggtgcccctagggtgctgttgttgcagagcctcgggctgggatcctgactcagctgctcaccagctgggctgccttgatatttaaacttcagtttcctcttttgcaaagtgtcaatcataatacccacaactcacctgtaagctctagataggattccgagaacagcaccggtgtcgaggagaagtgctattagccatgcagtcatacaggaaagtcctatgaaacaaaagtgacgatcaccttccgttccaccgtccggcagatgtcagttctgacaaatgtttgtgtctcttcttccagcttatttttcataatagagtgtaatataaattggagccatcctgtacacctacttcccttttcaatttaatgtatcagagcatttctctatgtcattaaatattcctttctgacatggccttatttcagtgctgctttaggaaatatgggttgttttcgactcttcactatcatagatttattacttgtagggaatattgtcataaaggaatctccacacttgcaaggttatttcctaaacatctgagtgaaatccacagatgcctcatgtcccctgttgctttaaaacgttgctctgtcccctcctaccagtgggacaaggtcaggctccaagtccccacactggggaggggtgaaccttggggtggggcagctgcagccctggccaggccctgagagaggccagcccggggagccactgcccgggatctcccacctgaatctcattcctctggttcagcagtgaagctgaacctcgccaagcctttagatctaaattcctgttggcaggaaaacactgggaaagagagaaggagaccagttagacatcactgccagtcagcagtgacatcaggaatgagagacgttttgagtctcagagtgcgggggatgtccaggcaaggtcagtggggaaaacgcagttggcgttacaccctcccccatacaccagtgtaccaggttagctgctgttaggcacgtcacctgtcccctgtgtgtgcaccttgtgggtaccacccttgggtgtatctcagtgcaactggggacacatgggtgttgcctctgtgtggtgggagacatgcccctgactccagggacaagcaagcagcaagaggagggctggaggccagatcccgagtttcattcccagagcttccctttcagtggcatgaactaggagatgcatattttgttttcaaatcatgagactggccaggcatgatggctcacgcctgtaatcccagcactttcatgagatcagccgggctcagtggcttacacctggagtcccggcattttgggaggctgaggcgggtggatggctggagctcaggagttttgagaccagcctgggcaacatggtgaaactcatctctacaaaaaatacaaaaatcagccaggtattgtggcatacttgtggtcccaaatactcaggacactgaggctggaggatggcttgagcctggggaggtcaggctgcagggagccaagatcatgcccctgcactccagcctgggcggcagagtgagaccctgtctcaatcaatcaatcaatcaatcagaatgaataaataagttatgagattacgttaacatttccaattcaaatttaagatgacagtgctcctcttaacctattggattttatatttgtgaattttttctctttcagtaataataattttggttcctcacaacattcacataattacttactggctttatcctggaagaggaaaaaatttaaataacgatgccagacttaacactaacactaagacctactgaatgatacatacgatttccttgccattctttttatccttaaaatacgcgccaccagttaaaaaaaaaaagcctaaattctgtgctgtaaaactacttcaaataattttgtctttgttttagttatgttacaaactctatataaattttcacttttgttggtttccttttctaaggatgctctcttttaaacttaaattttaacaaattcaaattgttttgaatatgggaaacattcacatagttctggactcaaacactaaagccaagtatctccagagcagctagcttccatttctaactccacacacacgtaaagtcaccatttttattagtttctgatttatctttccagtgcttttcttttgcatctataaataaacacgcacatatacatatccttacactttattacacaaaagatgtgtcactacgtactgccgtctgcttttgccacttaacaatatatctggaaatggcgtcttatcaatccctggagaagggggctgggcctgggttggagggaacccagcaggctgggaaggaggggtctggagcattttcttctccaggcaacagcaacactggtggtgggggattgacctggggtttccaggaatagatgttgctggaatgcttgaaagaatattaggagagaatgtgagtgctcagtatggtccgggctctgatcctaagcagcctgatgcatctcagttgagactggattcctcggccatcctggggtttgtaggaggatggcactgggctacatagcagctcccctaaatttacatctacccagaaatggggaacatgaccttatttggaagaagggcctttgcagatgtgattaagtcaaggtgaggtcatactagatttgtgtgggccctaaacccagtgactggagtcttacaagaggaggggacacacagcaaggccggggagaaggccgcgtgaccccggggacagagatgggagcagcgcagccacaagtcaagaatgctaatggttgccagcaacaccagaagctgggagagcaagaaacggattctcttctagagctgccagagtggggctggctctcctgacgccttaagctcaggcttctggcctcagaaccaagagggaatacacttctgttggtctcagccaccccgttggtggcactttgcttggcagcttcaggacactcacagagatgggatggtctctgaggctgatccctgttctcacgcccttggccagtagccttgttctcatccgagtgtccagagaaagggctggaggaacgcaacttgggaaagtgcaggcgtcccactgacccaggctgggtggcggcagagagtggcattcccactgaggtagctggtgactgcctggccagcaggggaaaccgaggcacccaggatggcttcacagccagacctggggagagtgtacccatcagcagagcaagtggtggggggagccatcgggagcccgggagaagagggtgggtgtggggtgatgagggcaccgggaggaaacatcccgccagacaagtggagaggcagctggagtgttccaggggctggggctcgcaggacagctgagtgtgggggtgctgaggacacggcgtctgcacactggtgtccaggcggccctcgctcagcaagctctccaagtcgtttctgcaaggtttatggaaacgcggtttttcccgggaggtatgtgtgtcactgggaattgttgaatgtctgtttacagtcgccactcctgctggggtgattaaaagcgccatcagagttgattgtagcctgggtggtctcttgatctgggggtcctctgggttgagggggtgctcttgcccttccctttctggtgtagcacgagctgagctggaagaaagaggctcccgcaccctcctggccagagaccacaaccccagacgacccctgtgaggtggcgtgaagtctcgcaaacccagggactcggcttggacagaatttcctggctgctccagtcttgagcccttctgtcttgcttgtcttgcttttagtcctgcctatctgagacagcccagcctcaccccgtgtgtccagggatctgctggtcttcccccgagctccatccctctgtcccacgccagcccctccacctggcacacgccacacagtgagcccccctcaccccctccagggtgcagctggaggtccgggaacctgcgcgtgggccctgggaagcagcacggggctttgtgggccaggcggggtccaagctcaaaggctgggtccacagtgcctgctggtgaccttcggcacgccagcttcctcccgaatcagggatgcccttgctctgggtctgcttctgctgtaggaaaccttctccaattcaggctgagacagatgtcacaaacaggactgtctccccgattcaagctgagacagatgtcacaaacaggactgtctccccgattcaggctgagatagatgttacaaataggactgtctccccaggacaggcggcctgtgctagtggctggaacctctgtcgtgtcatggcaacacagccaacggctgctgtgtgtccctcccaaccccaggtcccagtccttggacaactcatgggacagtgcggggagcacagaggtaaatctccctgccgcagatgccactgctgcctgtgggtggggtccctcggtgcgggttcctctgcacctgctgtcctgtgtgtcctgctgggccagtgtcacctgggcttccctcacacccactccccactgactaaggaggccacacagaccgaggcctgagccccagcccgctgcctgcaggttcagacacttgggcatgtttcttagccatttggagcctcggttttcccatctgggaaatggggacaatgatatctcagagacactgtagtgatcaccggagaggaccacagaccactctcagtgggggtgccaggcatcgtgtccatgtttggcgaggaaggattcagcctgacccttggcttcctccatcccagatgtcccttgaggcacgtggcctggggtgggggatccggagaagaagggagacaggccacgacgtacggtgaccccaggctaggcccacagacccgggtagatcgccaccactcccactggaattctcagggctgtacactcattgtttggaaataattatttttgtgcagtccttagtttccgtaattaattctttgataacagtcccttctataatagctcctcacaaagattctatagaaagcaccaggcggtttcagctgagccggcagcaacagccttttctctgagctcgaggtctaggcacagtcacagcggcagagaaatgctgggtaaagaggccctgggcgttgggaggggcgccagcagagcaaggggcttcccaccgccgcctccctccccacaggctggtcaggcggccaggctacaggggccctgctctgcagaaggcctttccttccagagccctgcagcctctgggagccagcaccggccccaccaagccaatcctcggagtgggtggagtggggcctgggggctcgaacccccagaccgacggccacagcttgtcgtctatggcgctctgtgatgggatggggggactgccacagagggaagaaagagaatcggcccctgccttcccaggggcctgatcctacggggaggtgggacactcacgctcaagggcccagatgctgtaaacacagctgtcccaggtggtccaggtcaggaagaggctcagatgggtcggagtcccacctccacggcggttttggagaacagcccaggggcaagtgagtctgtagatgtatctggccaccccggagactcccctcttccacctgttgggagccagaaagcctccatcttcctgccccgcctcggtctgccactcataaagcctagaccatcctacttcgatattgcaacattgcatggctggggtccttttggttgaagtgacagaatcccaacccaagctcatttcagaaaagaagggcgtttgcaggttgacttgcctagaaaatgtggggtagagtggcttcaggtgtagctgggtccaggagttcagaggcggtcactaggcaccatctaattcagactctaagctcaatcctgcctgtgttggcttcattctcagggaaagacggcccaggagctctaagttcagggggtcctcgaaactcccaacttggagggtcagggtgcttctgtcttcagcaaaatcccaggcagggctttgtgtgggctcgggccccatgcccacccctgtcctgctgtctgtggtggaggaatgaggtcctcttgctggctagccttggggtcacatgatcaccccgaggttggcagcagccctagaaacacagacaacaaaatacatgacactacgtaagagtcagcaggcgggttttcttaaacaaaacaaacagggttttgtgacgaagagaagaggaaactgtctgggaaggcgaagatcaccagggcccgacagcactgtagacacaatgacatcactcggagcagcgcgcttgctttctgggcctcacatgcccactcgagtatcttccatctctcatgcctgggaggccccgccccacatgctgtcccaggagcatagcaggcatcgtacactgtgcagtgtggggtacacacgtaggcacttcagacccaggaatcacggactcctgtctcctgccatatatgtgggaggtctgtctccactgtagacagagatatgaggtgtgtgtgtttgcatgtgtgtgcgtgtgtttgctttgtgtgcgtgtgtgcatgagtgtgtgcttgtgtgtgcatgtgtgcgtgtgtttccttgtgtgtgtttgtgtgcatgtgtgtttgtgtttgcgtgtgtttgcatgtgcatatgtgggagtgacagagagggagagtgtgcacacatactgggtctatgccccaagggccactcccacccctaccatggggatgcggtgcccttgggggtctgccctctgtgacccccaggcatgtgaattttctaaaactggcttctcccctcttggctcctgtccgtcccagatccagcatccacgtacatttgacgccaatggaaactctgccttgtgactcgtggaggggcctcctcaaggggcgtgtgactgtgagggggccaggctgggctcgcttgtgtggaggggaggggcacgctgcggggggtgggggggcgccacccccaccaggccagcctcagggcagccggggcagaacctgtggctctggggtaaatgccggggccagcttaaaggagtcagctctctgcagcctgcctcggctgggtgggaacgagtccaggcttccaggcatttggaacccgagcagctgcagggacaggctggagcctcagccttccctccccgaccccagaccctctctggcccctcttaacccagccagatgagctgtttgcgaaacctggcctgtcgcagactgcggagagatctgaggaggaaggaaaccgtttcttagcacctccagcagttcaagcccacttcgagccctccacgtccgggctttctcctcctttgcaaatctgctcctgtttctgcgcttccaggagcctggctggggctggaaatagaaatgcattccatgcattcattctctcaacaaatatttactaagcacctcctcagggcaggccggggctgggcacagcgtcatcctccgcctcctcgtcctcctcctcaccagtgagcaaaacagacaaagcctgcacctacgcggagtggatgccctagtgggggagcaaagggagggggaagaagtgcatctcgtagtatagggaagcctgagagctttgacagggcagccgggagccgggggtcacagttccacctggctgttggcggcatttgatcaggagacagtcgctggaggccgtgagcccagcagcgtggagctccctcgactgctgtgacttccgcgtggagcacagacggcggcgggggtggatgggaaactgtaggagtctcgtgcagtcatccaggccagcgaggcagggaagtgggcagattccggatgcattccgatgacagagctcatggggttcctggaaaccaggagaacgcgattcactctgagcaactggaaggatggctctgtcaccacccaagagggggatggccgtgtgcagggatgggaggcgggagcggctgtgcactcagggcaggagggatgtctctcgtgagacatttactggatgtccacttgaaggaagcagttggggacacagtccggaggccaggggcgagcggggttgcagagacacccaggagccatggagagtactcactgccttgacaaatctcttttaattcctagacccaggaaaagtcttgcaaatgtttatctggcatctcccccaatggtccccaccctgtaggaaaaagttcctcaggactccagggccaattttgagtcctcccaagggttcaaagtcctcctcagtctcctgaagctggagacacgctggtcatgcgtgagccttcacgtccctctctctgtcagcagaagccccaccaacccccaggaaccctgaccaccacaggaaggccgcagtctgatggtgaggctgcttctgtggcccaggtcctgaaaccaggaagaaattagatgagaaggctcctatcccccagcttccagcctgggcacttccaccccaccctcagcgtgatggaaaaacgccgggggtgtgtctgtgtgtgcgtttgagagtgtatgtacgtgtgttgtttgtatgtgcttgtgagcatggtgcatgcatgtgtgatttgtgtgtgtgttatgtgtatatgcatgagcattgtgtgcatgcatttgtatttgtgtgtggttcagcatacgtatgtgtttgtatgttatgtacgtgtgctctgtgttgtgtgagtgcatattatgtgtgtttgtgcatgaatgttcagtatgtgcgtgtatgttcttgtgtgagtgtgtgtttatgcgtgtgtggatgtgtgtatgtctgtggagtgtgcagcacgcatgtatatttgtgtgtgtgtgtgtgtgtacttaagtctggtgtaggccgggcacggtggctcacacctataatcccaggactttgggaggccgaagcaggtggatcacttgatgtcaggagttcaaaaccagcctggccaacatggtgaaagcccgtctctactaaaaatacaaaaattagtggggtgtggtggcaggcacctctaatcccagctacttgggaggctgaggcaagagaatcgcttgaacctgggaggcagaggttgcagtaagccaagattgcactctagcctgggtgacagactgagataccgtctcaaaaaaataataataaagtctggtgtagagtgatcgagtgacatcacacagagccctccggggctgcacctctcagaggcagggagcagtgagtgagtgtgtgcaggccaggcagtcatgggcgctccgtcagcagcaggcacgcaccccccgaccctggggacaccagttgtgtcaagagagactcaccgtccacctcctggctgtgggcagagaagctactccttagaccaggtggtgcttctgggggaggggagcgaggcccaagaggggctgaggggcaagaagaggaagtgaacgtcctcaggtgaaccacagctggggtaggagagggcaggagggggtctgggagggcagccccaccagagacaacttcctttgagtgcttatcgggaccttggcacataaggaacccaaatgccaatgggtcagcagtgggcacagagctggtcagagggtgtgtggcctgtggtcagtggttcggggaaagacaaggatgcagtgaaagcagtgtgggccatggctggacagtgagctgagggctgacaggactcatcctagccagtgctgacctcctggggtccagtgcacccctgatcatgcaggtagccccatcaggattgaaatggggagcacggatgatgatttctgcaggtggttggaaagcagatagcaaatgccatgagctttctctagaaaatggccagctttatttacaagagtgagaacattactaacaccaccactgccaccactaccatcgccactatcatcccatcattatcactacaatcaccaccaccaccatcaccaccatcaccatcaccaccatcaccaccatcaccatcaccatcaccaccaccaccaccaacaccaccaccatcaccaccatcaccaccaccaccatcaccaccaccatcaccaacatcatcaccaccatcaccaccatcaccatcaccaccaccatcaccaccaccatcaccaacatcatcaccaccatcaccatcaccaccaccaccaccaacaccaccaccatcaccaccatcaccaccaccaccatcaccaccatcagcatcaccaccatcagcatcaccaccatcaccatcaccaccatcaccatcaccaccatcaccaccaccaacaccaccaccatcaccaccatcaccaccaccaccatcaccaccaccatcaccaccaccaccatcaccaccaccatcaccaccaccaacaccaccaccatcaccatcaccatcaccatcatgaccatcaccatcaccatcaccatcaccaccatcaccatcaccaccaccaacaccaccaccaaccccaccaccaccaccatcaccatcaccaccaccaccaccatcaccatcaccaccatcatcaccaccactatcaccaccatcagcatcaccaccatcaccatcaccaccatcaccaccatcaccaccaccaacaccaccaccatcaccaccatcaccaccaccaccatcaccaccaccaccaccaccaccatcaccaccaccatcaccaccaccaacaccgccaccatcaccatcaccaccatcaccatcatgaccatcaccatcaccaccaccatcaccatcaccaccaccaacaccaccacgacaatcaccaccaccaccaccaccatcaccaccaccaccaccatcaccatcaccaccaccatcaccatcaccaccatcatcaccaccaccatcaccaccatcatcaccaccatcatcaccaccatcaccaccaccatcaccaccaccaccaccaccatcaccatcatcaccatcaccatcaccaccatcaccaccaccatcaccaccaccaccatcaccaccaccatcaccaacaccaacaccaccatcaccaccaccatcaccatcaccatcagcagcatcatcaccaccatcatcaccaccatcaacatcaccaccatcaccatcagcatcatcatcaccaccaccaccatcaccaccaccaccaacaccaccaccatcaccatcaccaccatcaccatcatgaccatcaccatcaccaccaccatcaccatcaccaccaccaacaccaccacaacaatcaccaccaccaacaccaccaccaccaccatcaccatcaccaccaccaccactaccaccaccatcaccatcaccatcatcatcaccaccaccatcaccaccatcatcaccaccatcaccaccaccaccaccatcaccaccaacaccaccatcaccaccaccatcaccatcaccatcagcagcatcatcaccaccatcatcaccaccatcaccatcaccaccatcaccatcagcagcatcatcaccaccatcatcaccaccatcaccatcaccaccatcaccaccaccaccatcaccatcaccaccaccaccatcaacatcaccaccaccatcaccaccaccaccatcaccatcactaccaccacctagctactactctcgggggtaaggactggatatttctggttgccccacttcctctctccatccctcttcctgccacctgtactgcacttctgaaagctgcccgctaggcaggtgacttctccctctaggctccttcacctctgggcttctgtttggggcttcagccaatcaaagatggtggcaggacatcagattcaggaaggacagacaggacaggagggaccttctgaccacgtccctccaggagcacaccctcctgccaggtggcccctccccggggctctgacccctgttctggcaacagctttccttcttttgcttccttggtcctgggcgtggtcacgccttccactacaacaggccccttggtgtttttccctcaacctgccgacacctctgaaaatgctcttttcataaacaaatctcttcaaacacccctgacgagtgggccatctgtttcctgcccagactctgagaggtgtctgtcttgcagtgtgccaggatggcacacacagccagggaatcccagcagcacctgtgcaagaccagcaccacggcaaagtgtctggcgttacctgtgcccgcagtgtccaggctgaactcagggctggggcctatcctggggctctgcaggaaagccaggcttcaggcagacggggcctgggcaagctccagaacccagaggtggtgagaaggcaggaaagatcccgggaatcagataggccaggtgctatgctggaggggtgacctgctgcgggccccagaacctgtcctgactgccccaggctgtgatggtctggctgaactctggtgtccgagagccttggagagagggcaaagaaagcccctggccacggggacccaccacgccacgccacgccacgccagggcagtggggaacttccaggctggctcctctctcctgtgcatggcccgcctccctgcctccatcccctcctgattcccatcctgtccttcccctgctcccaccccattctattttcaccaaagcagctccctggtttcccagctcagaagcctctgatgggatgggcgtgaggagcgccagcccctgctgtccattggtcatgacctccaaagaaagcaacccccagagcaaggggacaaggaggcacctcactgcatcctgggctggcctctcctgttcccttgactccaggacgggagcccagagtgggtgcctgtaccccgggagggtctgcagaagcaggcgggtgggactctgtcatttctctaccagctccttccggagagtccaccactcctgagcttcaggggtgcccggacaaaccccagcaggggccacaggctgtggtggggggcactgtcccaggcaggaggaaactggcctcactgcacaggtgtggctggaaaggaagtgtgagtttctggcgtggagcccaactggggctgagacagcactttccctcccctgggaccccagctccttccagggtctgtgtgaccccatttccttccaggtctggatccttggcacgacagcagcctcagtcactcttccttcctgccgcctctgcagctgcctcctgctgcctcctacctctttctctcctgttcttctccgtagtaacactggtagctgccacccccagcccctgctggacacggctgtgagagccatctgggggcaggtcaccctttcctggagcacactctcatcttgggactgtgaactacccccaaagatctgggaggtgtcccaggtgccctgacaaagccaccgtttctttggaatctcatatttttatatgaacaatcccagtgtgtcctcctccactgccctatcaacactggcgctaatgggcagtgcagcctcccctcagcctctgcctacaaggacagtgctccaggaaccaggcgtctccatcgtgccgctctgcctacccctcccggcccatcaggatggacacgagtgcgcatccccagaacttagttgagaatgacctgcagtgtggtggccccaaagatgaccaggccctaatcctgggagctgtgaaaatgtctcaccttacatggcagagggtagctggggcgggtccccagccggctggcagtggagaggcacctgggttccccggcaggcccggtgtgagcacagagggcaggggagggaggacacccagcatcagatgcaacacaagggccccgccccccacagctggcttggaaccgaggaagaggctgtgagccagggaatgcgggtggcctcgggaagcaggaaaaggcagggaagtggcttctccctgagcctgcaggaggaaggccgcctggcccacactgtcatctccgtcagcgagagctgggtcaggacatcgacctccagaagcctgagaatcgatctgcgtgttccagccgctgagtgtctggccgtctgttaccacagggctggggaggcatggactaagcaacaagccccatggggatctcagttctgcccccatgagtgtgcgaccaggagtgaccacagcctccctgaacccggaattctccacctggagcacggtccgtgaagagccaggctggcttagggagacaacacgatagcgcctggtaggacggcctcctccgtcagggcggcacctctgtccagggacatcaccaggtgggggtgggctgcaggggctggggaggagggacaggccctgatgagggagaggtgccctccaaagatgaccaaggcgtcagcatctgcctctaggcagggctcccaacctcgcaccccgagtgggctgcaggtcagtggagttgttggtcccacctggcctgggactggacggacccccagcaaggaacctcaggggcacccagctctccttgtggctgggaatgggacccagtgagcacgctctgcccagggtctttaaacacaagtcagtctgtcctcagtgtttaaagccagccccgatgaccagcagagtccccttcccaggccaggagctgtggccccggcatgcgccctccagcctggggagaggggccgtcttggagctcagcaatcagctgaggtggggtgtttgagccgaggagcagagggcgtctgcagaggtgagctgagggaggcaggtcaggctgtcgggggcagttgctgccaggagttgggggcagcctgctggcgggggcacctggacggtgcctgggctgttgactgactcaaggtaggttggaggggttgggggagctgccttcttgggaggcctttgcgaggataaagcgtggaatgtcagagatgactcacatcttctgttcctgggtgggcggggtcggtgacgaagggcggtcgggaggagacacacgtggggtcacatagctggactcaaacccggctctttcccagggaagtgctgcactcacgcctgacgctccctggagcgccctgtagggaccccacgaagtgcaccttcttctcgcccctcctggccactgtgtttctcaggagtatcctttgaggaccctttcagtgaaattgcaggtttccagccgtggccagggctcctgccaagcccctcaattagctggagtcctttggtggccacagggtggccggcccactgctgctgggggccgtcagggcagcccgtcctgggagagacaattctccagcttccgccttctcttaggggactgacctggtgcttgtatcatggaaactgcttttaaaaacccagctcctggggagacaggggtgtgagctcagcactgggctgcatatagccacccctgtctccctgcgggaccctctctgcatccccagagctgtgatgtcaccgtgactcccagtagctgctgagcacccggcgtgagcccctcctggccagctcagcactgacgcaaatcaaaggctcccagctccccgggcagctgccactgccccagctggcagccctaggctgcccggggtgaggggggctctggcgtgaggcctgctatttgaggtcatcagctgctcttcagggggcagccaacatggcttgtggggctccccagaggtcagggagaggcagatactctgaagctcctggtggggacggtggccccatgaagccacaggttctgcctgccaggccagcccctgctcgtctccctgttcccggcggatggtggccccttggctgtggtcattggcggtgtggcccgagtggcacttgaagcatggcaggaattcaggccagggtgcccacaggctgtgaggcaggcgccgtgcctgccccaggggtgtgaaggtggcacatgggggccatgtgccatgtgtggtggcacatggggtcatgcagggcagcctctgcagggggtgagcggcatgtgggccgtgtcctatttcctctgggtccctttatacctgggcttcttaacagcagctagtgggagctacagctgctggcctccgtcagcctcccagggactgtctcatctttcagaagatcctcgccagggcggctcaccgccacacggacacacggaacgagtcttctgagagccacatgggagctgggctgcataatgggaggcctggggcgccctttagaccccaccagactggagccaccatggagatctcagctgccctggtgagcgccacccactgctccacagacacacgctgccagcctgcaggagcaacctgtgcatccttaaataggcgcgtgcacacacacacacacaaacatacacatgcacacacacacactcatacacatgcacaaacatacacacgcacacacacacatacacaaacatacacacatacacaaacatacacatatatacgcatacacacatactcatacacacatgcacacacacatatgcacacacatacacatgcacacacatacgcacgcatacacacatacacgcactcatgcacacacatacttatacacacacgtgcacatatacacatacacatacacttgggcttacacacacattcccgtgcacacccacacaacacactcacttgcacatacatatgcacgcacacacacatcaagcacatgtacaggacacgagcacacacacgtgtgcaaaatgtgtgcacacatgtacacagcacatatgtgtgtatgcaatgcaagcacacgttcacatgcataacggcagagagcgtgtctcaggattttgaccgtttctctgtcccctccacgacacacacactgtgcagctggggctgagaccctctgccctgcactcagttggcatgaaggatcagggtgtccacgggctgagaatggccacctgggggctgacaatggggcagctgttcagggtcagggtgggtccaggtgggtgggacgagactggggttgaggacgatgatgtgaggcccccccccagggcacctttgcccccgacaggcagcccggggtgagaactggctccagccacctttatccgatacgtgaggcagacagtcacgggacacggtggacatgacgctctgctgtgcagagaaaccgctctgtgtgcacagcccaagttcactgggcggtcacagctgggtaaggatggggaacacagcagcctgtgacctctcagccactgcagaggccacctgtgtgggtggccttcagagggcagaaccctccctggggacgcacctgcctcaggcgcggcctgtgcattcctgcctggagacaggagctaccagtccccggcgctgtttaccttccgtctggcggcccagcagagagccaccgccctcccctctcctggcctatatataaggccttgtcctggctttgccctgggcggggacgctgctgtactgtgctgaccctctgctcccagaaacccagggccactggcagcttcagggacaaccctgcctctgaattggggccacggacacccaggttactcacaaaataggtgcccttttccatgcagatagctgaagtgcagacccagagctcgtgggattgctggtggaaacttccagaagcatgcagcaggattgccatggggttaggaagccaaacaatcagcagacaggcaggtgcatctcggtaggaccccgctctggggaggtccctgaactgcatctcctgctggggtcaggaccagcctgcttcccagagcgccccgtgtgctcccatagcagggccgggctggcactcctgggcaggaccggcactcctgggccaggctggcactcctgggccgggctggtgtcagcgggccccaaagacaggccccaggcctgggtgaactcaggggctccagctgcagctcaccagcccaggaagtggttgctgggggtccttaagaggctccattctcccggtgggctcccctgcatcccctccggctgcctcccccgctgcactagcctttgcaggtgtgtgtgtttacctttaataacttaaccctttggcccagtctccatctgccgacgcacagcaggctggcggtcgtgctccccacgtggcagggctggtggccatcaccagcaagtgtgggcagggctggaggggggaccaagcaagggcttctgccctcaggcacagcaaaagccagagaggcggaaggacccctgcccccaccccacccgctggggaaggtgatggtcaggagggggctgatcgagggttgctcagtcaccccaagatgaggagcagtcgctggcacagccgcctcggccctccttctctcttggcaggtaaatagaggcccaggtggcacccagaccaaggcagacgcctctgctcattttggccgagcaaggccaaaggcagccaagggttggtttccctgcccgcccccagtcgagagtcaacatcccacacacgccaaactgccctttagttcctaagacgtaaatatttgctcttccgttaagaaaatactcagcggtcctcctttaagtgcagtgtataccccggcgcccttcaaaagcaaacactgctgtttccaaacaaggagtgcaaggagaaagcctgcgtgggggctcctgggggtgcacaccgacgctgcgggctctgccccgacctgcctgaatgttctccaagcccagggcacccaggaaggaagccgagtttggcgagagggagactggcaggagcccagggccctgagaccgaggctgggaggaagatcgggctgctctccgccacttggtgttgcacggccgcccccaggccccacccgggggcggcaggcaggggcttctgctgggagtgagccagtctccaggcccccagcccccacccgaccttgccagagcagcagtcagagggcagagaaaggcagggaccttcagttgcacaggaaggtctgcatctgggtccgttctgcttctcactgcacatgtggccttgcgcagcctgtccgcctctcgagatctcaatattctcactttaaactaagggaacacagcttccttgcaccgccgctgacctccctgggctggacctaagctgtggctggtggctgggggccccagcttatggactggggcgtttcgtcccaacagtgtctcgtgacttcacgtcggtaggttggaatcggccatgctgggagtgtttgcaccacgggaactggtgaatgctgtgcgtcaaagccaggtcaccgcccaccgacggccctggtctcccagggcccctctcgcctcaccttgggggctgcattacagactggaaaggctgcttatgagcatggcacatggtggacccttgctacaggagtcacacgaatgcatgagaaaaccaaggaacaactgaatagacagctggggccatgctctctcacgtctccacttctgccgggtgtcagaacttcccagggcaggggagcagccccttcccacaggcatctctccctgcagagaagacgccccagaaacccacactgcagcgagggccagcgtggccccctgcctccctggcgacatcacaagggcctccatgcaagtcccaagcggtccatccgaggtgcagggaagccgggtgcccgcgctctctgactgcttcctgtagatacgtatcgagctgcctgggagcctcttcgacctgggtgtgtgcgtccctgtgccccagccccctccggagaggctcctcactcccagctcaagcagatcctagaagttgtctctgatctggaccccgctccagaccacactctggctgggagccgggtttggggctgaccacgtgagaactcccacggacgtgggttagcgcctgctccagggctggcggaggaggaagggtgcccggccgcccagaccccaccatctcatctgggcctgaggcatcggcccgcagagccccagttccccgtcgccgagagggtatgagaagcgtgtgcccagccagagctcagtgaggacgacctctgacttccttcattttaatcacgtctttccaggggcctctggagctgatgcaggggctccctgggcctctctaggggacagtgttactggcttattttctgccaacaggagcaaaagattaggcaacacatcaccctgagttgggcggggtggagggtcgtggtcaatcccgtatccaccacgtgatccaatgagaacaggcaaggcccgggaactgtgagtaagaaagcgctcgggctgagtcacgtgcagctgagcgggggcctgtccttcctgtcctcctggatggaggccctccctgcgggttcctctgctctttcctgccccactccttctttcatgaagcagcccctccaccccgagcctgtcctggccccattttaacccacgctgcttcttcctctgcatctctggctgtcagggaggccccgctcaagggcctgctgaggctccaccaccccctcctcctgcagaagacatgtttttcacctgccccaaggaccaggcagcctcctgccaggcctccccctgcatcccctcattccagagggctcccaagggcagaggcagcttgaagtgagcgtctgtggacggcaggcccgcctcaggggaagcacacacaggctctgctgcactcggaggcttccagccagccgtggacggtcaccattccccagctcggggcccactgaacagggctgggagatggtgcagtgggaggcccagaggaggttctaggcctacccagtacctggcctggctgcttggggaggggcagccactgtccctggagggcctcgtctgtgcgggtgcccccacggcacacaccatccaggaattccaagtcccgggtcaggagtgtgaccaccgcctgcctgcagcaggctgaggagtgaggtctgtgagcctttgcttcccggcctgctgctgacttacccctctgccaggaacgaccacgctggactctgcagcttgggccaagatagcagtcccagaagaatgtttctgagatagggtcttcgtgtcccatgatccggcagctcccagaccacagtgagggggccagggaccacccaggtctccgtaccccttggggagctctggcgtcacccccatctgtctgttttgggtgtaaagtggagtccacaggccctggaacccaccagcagttttgagtggctgggcctgacctttcagttggtactgagaagccctcggccctcacccccaactgccaccaaggaaccctgtggttacctaaaccccaggccatgtggctgggaccccagggcccgcctttcccaccaggcccacttgcaaaggcaagggtgaacccccaaccctacagaaagcaggcacccgcaccttccagatggctcccccactgccccaaagcacaaatgactggtcagaccgtgggcctgagaacagacgccccatcacaacccaagcacacactcccaggaaacaagccagcggcccctccattcatctgaggagcacacgaagagcttagacctttttgaactcttcttccagagcatgtgatggagccacacctcactgttcaagaccgaccgacagaggacagatgtgcctggcaggttccttccccgtccacagtgccggcccccagcccggctctggccctgttagcctggtgaccgtcacagcccaggcagggaagggacgtcaggacccagggaccccaggacacccggtgggaagaggcctcaaatcaggcagggccttaggatgcttgcggtggaatgggattttagcgtctacttttgaacagtcatagattggttttcttgcatattagaaaaaaatgtagggcataaaaaccacgacgaaggattctggcatttttggcagaggctgaattcgtagtcagcctgagccggctgaatgagaaacacccgtctcttggaggggcctctggtcggcaccccgtctccggaaggggccttgcggtctctgccctcaaagtgcagaagcatccacagatgtggaaaagtgggtgtggcttgtgccaattacactgtgtttatggacctggaaatgggaattctgtttaactttcatgtgtcacaaagccttctcttttccccaaccatttgtaaatgttagaatcattcctagcttgtggtcagacatgggcaggctgaatttggccatggccacaggtgccaccctggagctgcctcatgttcccatcctgtggctgaaggacagacccaggacgctgaaggggctcgctggacgcatgtggcactgggcatcagggcctgggctggaactcctgtccccacctcgggggccccacctgggggtcttgggggtgcggtgggcactgggtatggttgctgccggctgtatcccagccccttcctgcctctgccacatcagtagggggcctcttgcctctggggctggaggtatcccggctgggccaccatgcagactgtggggtgctgtgtggccaggccgggcccagaaggagtcccaaatgtcagaggagagaaagaggccccacccagagggaaacagggtggacagtaggagggggctgggtcgctgaagtccccaaggccggctccttcaaggactctcaacaaacttcctttttggcttaaagttattttgagttcaggtctcgcttcctgcaattctcaaaatcctgaagctccacgagtttgccctcgccgcccagaggagaccccggaggacccagccaggctcactgtgaaacagcccctcggagctcatggcccctcaggacagggtcccagccgcagcgaggaagcagggcccaggggctccaagggtggcgcctgcacgcatgcctgggagagcaaatgacacacccagaaacccaccagcccacttggacctgccctgggcagccccgagacatggtcagggcgatgcagactgcgtttccctgcgagaagcccgcccctcaccacggcgagccctgtcccgatccgctcttgacctgtccagggcaccacggccttgcctgggaacttgttgctgagccaagatgagcccaaggagccggcagttgtgccggaatattccaaaggcccagaggctgtcacagacagtgacgtgtgataaaaatccccaaatgttccaggacaggaagccagtttaacccttcccgtttaccccgcctgcggctgctgtagaaacacaatcatttcatagccagaaatttaccgacgtcctgctggaagccatgaatgtgcctgacaagagactgaaacagcggttggcagagacatgaataaaagaccagtgtcttggtttaatcacctggctctaaggtggcgcttgctttttaagggatccaggggccaaagctggaggaggaggcagccagctcctggggggagggtagccggctcaaccccctggaggccctgtgtgacctcagcctaggaggctgaagctgcagcctctgcccactgcgccatccttgcgaaggggctcccgcagaagggttggctgtgcccactaggagctggtcctgctgctcacttccatggccctggtggccttcatggagacagccattgtgtgcaaaggacggaaagtaagaggccccctccttctctcaccctttgtggggaaaccgaggcaagtgacaccttaagtcccagggcgctctgtggagcagctgagactccagcttccattttctgacttccagggagctatctttctaggtccctgggagggaggctggaaagggctcgtttcagaatacggttgggcaagtttgtttttctcaattctgcattaaaattgtctcgagtcatggttctgatgacacatgaatgtgtgtgtagattgtgcgtatatgcaatggagccaatcgattagcaaaagcatattttgccataatttgtaacctatgctccctacataatgactgcggtttaaagcacctgagaaaatgttaataaaaggtatgagttctctggcaatctggctgacctcctgaaggccacgactgaaccaaggtatcttccagagcaggagctatctgggtcacctcaggatagaatcccaaggtaattctcttcctccccaaactcactctttcccgccccctcccccctcctctctcatcctctctcccgcccctctgctctcacacacacacttttccagacggagctgacggcgcagtccctccgcccccatcacaggtggtccagcatctggcaggaggggcgtatggagaatggtcccccccaggacttttggggaggacagcccttagcacaggggtgcagttaagccctctgacacctgtcccccaccccgagacattctgtgccacccccaggtggctgggagctatggatcccagggaactgtgactgtcagagaccattgggaccgcaggaccgactcccactcagaccagatctggggtgagagggggtggagacgtggggatgtgggggccctgcatggctcagggctctgaggggacattgagcataggtgaccaaccctccccatttggcctggactagcagggtgtggggcttttagtgctgaaaccaaggaagtcccgggcagatcaggaccctggtccctcgctgggatggaagtctgggagatctgtggggtggcgggtgtgcagatgaaggctgaggccccaaggccccaccatcccaactgtgtgcttgccacctgggtcccaccccttggagaggacagtgttgagtcctggccagttccccctgcctgggctcaggtggcagctgagaggggtgtggaggacacctggcccctcacactgagcctgctgtcctcggaacaggctctgcagagaccaagacaccagctatggaatagctgataggcaccaatatgccctgggccctgtctcaccactagcatcaccacacacacttctccgacgctcctccctcccggctcttcgagatgccagcagaaggagacacagtgcccgagtgatgtgcagcggcacggggtcccccagcccggcaggtgagagaacggggccggcttggttcagggaggccccagctgaggcctcctgtccaggcagccggtaaatagtttaaatccttttttcctcactatcaaaataatacatattcattgacagagaatttggaaattaagaacattacaagaaacagaaggagaaaaacccaccatatattcacaacacaaagagaacaccttcaacattttggaatgtttccttccagcattgcctgtttctgtgcatttcaaaaacatagttaaataatgtctgtgtgtgtgtgtgtgtgtgtgtgtgtgtgtgtgtgtgtgtgtgtgtgttctagctgggttttctgagattctgtatttgtctttttggcatccatttgtcacagggccaattgtattcactataattttcttattttctgtattcttgatgctctggcattcaaagactcttgcagactgtccctcccagagctggctgatttcagagccaagatagggcttggcctagagcagccagtcctgtctataccccaaccatccgcttcatctcactggtacaccaagccagcattttccctgccctagatgacctcagagccaggcaagcagggacagcccctacgccccaaagtccaacagaattgttcatgccagccagtcctgagtctacccgcctgccctgcctttcccaaggaaaccccaagaaaggctggtgcctactcctccccaaactaactggcatttcctggccctgtgatgcgtcgcaggcccctcctcttgtaaatacaaaaatctcctttctgggatatggcctcttcgcgttgacactcagtcatacctccgtaaactcactcccgggtttgattttaaccccacgtgtgcgtgtgtgtggtgtgtgtgtgcataagcttagctcacgtttgttgctcaacactgtaaccatgggggtctccagtgccgttagcatcctttttcaatgtaatttgtaatgattgtatggcattctctcctatggatatacccaaatctctccttttgctatattggatttgcttctgtacattttttaattaccctgagatgaatctttttctgcatcaatattttcccatagcttgggatctttccttatgttagaggatcagaaatagaagcccaggattgaaggaacgtcttcaggttgcagattcacgttgacaacatcctctaaaagtctacctgcatttacgctccactgaggatgatcagttaatacaatttcactagttcaacagggaaactgtagtgtccggatgtacattcttttgttgacgaatgaggtcgaactttcttcccggtgtttagtgttcccttatatttacatccttgagaactccctactcctcttctcgacctgcctttcaagttgaggtatgttttaaaaaggtaaactgaggcataatatactttttaaagagttgacttgagcaaaccaccattcatgaatcaggcagccccacaccagaatggatcaggagctccaccaagggaacacaggggcagctctcctaggacatgcgcagatgtcaagcagagaaagtggtctgattggtcgcaggtacgccattgcctgttgtacaccagagaaggtatctgattggccacaggcatgcagttgacacacataaagcagagaaagtatctgattggctgctagcaggcagagaaggtatctgattggctgcaggcatgcagttgcctgacatgcaccagagaaagtatctgattggtcgtaggtacagcagttgcctaaggtgaagcagagaaagtatctgattggccgcatgtacgcagtttctttattgggtccgtcccattggaaagtccctggttatgtaagtttgttggctgcctctgattggtggagcttaagttctgtttctctttaatgcaggcatttacaagaaatagctcagtttcgcttacctctgcaactcaagctggggtgagatcacttgcgaggactgcctggcaccattcgcttgggcctcttggggcctagtctccgatttaatgtaacgggccactgagacttctttatttccgtttggagaagttctttgcttatgaggggattgttacgggttgaattacgtctgtctccattccactcccccatttctatgtcgaagtcctgacccccagtacctcagaatgtgactcatttggaaatagctttttgcagatggaattggttaaaaggaggccatgctggagtaggctgggcccctaatccaatgaccactgtccttccgagaaggggagatttgagcacagacaggtgctggagaacgcgtgtgaagagggagacagggaccgggatgacgcttccaccagccagggaatgccaagggtcccagaggcgcagagagaggccggggcagacgcagtcccccagccccggaaggaaccagccctgccaacggcttcagctcgggggtccggcctccagcagcgcaagagagtgaatgtctgttgtctggacccccgtctgtggtgctttgtgcaacagccgcgggacacccaggggtcaagcctgaccagccggatggctgccagcatggtctcgattttctccatgggggatggaaggcagctctgctcccctttcctggcaaggcccctcggagctggccctgcacggttcatgtcacagaggggcccgatcccctttttctccccagagaggagctctagggggttcccgacagcccaggacgacatgacgcaagcagccctcagtcccaagtcccctctgtgacacccgctgcaggtgccaggcagctgttggggggcggctgttggggagcccatctgaggggcttccagccacagctggtgagggtcccttggtcctcagggatgcatcctggataggagtccaggactgcagctcctgctcacctggttgggcaaactgcgtatagaacgagggccccagcaccaggaagggcccccagcacagaggatgtgggatgagagtggtactgggcagggtggagtttcaacagacagaggtagaagcctcaggccagcacagccctggcagcctcgtggcccccaatgccgctgggtcagagccaacaggacagcctggcctcacgctgaggccacagcagggcgggctggggctcactccctgcacattgcttgcacctctgctctcagccccacgctttgtttctaggggcccggaagctgcacactcacttccagaactcccgtgcctacgggcgcctcagccagctctgccgcaggaggaggggcaatgcttcttgcttccagttggcatcggcggcccctccggtcagggcaggtgtcctcgccctgctgggggcagcccctctggtcagggcaggcatccccaccctgcgggaggcggcccctagggtcagggcaggtgtccctaccctgctggaggtggcccctcaccagcacatccagagccagctgcagctctaacagctcggcagcacaggctccatgggcagcagcagctcctgtcaccaggagcaccctcctgccctggcctcccccaagcctgcttctcccttctgctcttctggcacctcggtagctgattcctggtgttaaatctcctctgttggaacatgtagaccagctggttttccttataggaccctgactggcagacctactgccctttagcgaagtcaagaatcaaagagcacctccaagccaggtataggccagatttgcttctgtgacatgtcccatgcggacccacctgagtgtgaccaccccatcttactgcaaatacaggtgacagccccaatgcaaatacaaacacaaatacaagcacaggtgcaaatgcaactgcaagttcagatgcaaatgcaatttgcagctgcacccgagaccaacccctccccaccacagatgcacacgcacacatactgacatattcacacacacatactggtgcagccctgcagctgcacccctgagaccaccccctccccaccacagatgcacacgcacacatactgacatattcacacacacatactggtgcagccctgcagctgcacccctgagaccatcccctccccatcgcagacacacatgcactcatactggcatattgcagagcaccgtgtggtagcattgtttttaactgcaaatacctgaactcaacctagatttccatggatagttatgaaccttccaatgggctgccactcagccgcgggaaaggctggggctgtgtggcagtggagaaacagctctgacgcatggcatttgctgaaaaaagcaaaagtgcagaagagcactagcggtgagcccgcacctccgcatagaggcgtaggcagtgcttgtgcctatttgctcattaacgcacagaaggatgcacaccgcggttggccatgctgcttgtctcgatgggcgggcggggaccgggtagaaggaaggcttcacagaatagataccctgcggtgcctttagaactttgaagcatatgccactctacaaaatacatgcaaaaatgtgctatttattcaaggactgaacttgagtaacatgattatttcacaaaagaccctggcactcaaggcaggcagtggtgagccggcagccccctcggcgaacacagctggcccaggcagcttggagcagcagtaggaagactccctgctcgctgtagacctgagctcaagccagaggagccaggcttccgagcaccggggccctgaggccgctggagagggtggctctcccacccctggagttccccagagacctcgtctggggccggcgcctatgcctgcttatttggccataatgaatgggcactccctggagcagatgtgcctaataacagtccagcaagactgcctcaagagccacctctgggacacactttaaagccacactggccacaagggacgctggtgatcccgtggtctgcagagctacctgctcagtctatttatgtcacctcactcccagccagccaggggaggccaggggagcccctcgatgactaatgtcacagctgccaccagggacaggccctgcagcagcctggaggcctgatgtgtccataccaacgatggccgtcagcaggggctgtgtggaaggacagagctgctggggccttgggaagacaagagaccggctgccgcctgtaactgctggcctggctgtgggcttttggctgaggtctgcagccatgcactggccaccgtgttgtacaggaagaggacttctcactggtttccacagtctgtgcaccctgacagcgggttgtctactggaacctggttcaacgtctcttggttgaaaccttggtggtgccagggcttgaaagccctttccccggagggctcccctgttggctctgacttgctgtcctcggtaggtgagccttcctgcccgtcccgtcagctcgaggcccacagcccctcacccctcttcccaagagcaccctgacacagtcacacagagacccgcaccgctgacttacggacagagaaacgcgcattgctgactctgagcacaggtggcctggctcctgcacagaccccccaccaacccagtctctgggcacacacttcaaagagcctgccagggttaatgccacttcaagaaaccggtggcctgggagtctagaatcttctggctatcagtcagcggtgcctgcctgtaggagcccaggcccttagcaaactcctaggctctgtgctttcccacagcgaatctttagcactaagattcagctcccagcctttcatcggttgtgtatgtctttcctggcccaaataatatcgtggtgggacactagataggagcctgtccccaaataaatgagttgcaacagtaactagttagttacttgtaattaaacacacagagacagactattattattattattttgagacggaatctcgctctgtcaccgaggctggagagcagtggcgcgatctcagctcactgcaacctccgcctcccaggttcaagcgattctcctgcctcagactctggagtcgctgggactacaggtgtgcaccaccaggcctggctaatttttgtattttaatagagatggggtttcactagatgatttaccccttttaaaaacaatgcacttggctgggcgcagtggctcatgcctgtaatcccagcactttgggaggccgaggtgggtggatccctgaggtcaggagttcgagaccagcctggccaacatagtgaaaccccgtctcaaaataataattttgaatctcgctcatcagagcgagcttctgtctcaaaataataataataataataataataataataataataataaaatgcacttacaaggaaatcagcaaagctagacccccacctactcccgccccaacacctttaagaagaaagatgccctcaaagaaggggggtgtccaaaaagggcaggacaagagctccccaggccacatcgctttgggacgtggggcgggggctgcaggctctacacagcttcaggtttctcagggctccaccatacatcggttccaaaggcccctctgcacaaggagactgtctcctgcatgtatgagttatcttcttgctttgcctaacagggtattatagcttcgatgtctttcgtcactggcacagaggttttctaacatccgtcttcgtggcctcctggtccggtggcaagcatcccaagctccgcttcacagatgaaaaagctgagaggttaattaaaccgtttgttgtcccacgcagagtcagctttggggctgggagccaccacaggacctggctccccacgacaccggctgagcccggaagcagctgaaggttccaggaccctcggggcagctcccaggccggcgaggaagaagccagggtgaaatttgcggaatggatttgtttccactcttggaattcgtgatcactttgctcctctgagtctctaggaattagcaattgtgccatcgaccaaattaaggtgcaaattatttgtattgttaaacgactccagttattacttggagaaaattttgcacttcaattaacaaaagcacacatggggcagtttctgagcaaagccagattttataacactcagaagaatgaggtccggccccgggcctcgccgccctcctcctggctttcagctcagcctgtcccctggcagtgccagcagcttatccgcaggtccccgaggccacccgttcccttcgcaccagagctctcccctctgttctttgagaagcaggaagctagatggatccatctcaagggggatcccccagaagcaaagcctgagagaagagctcttgtgaaagtgatttactgggggaatggtctgggttttatggggtgaattgcatccctcaaattcccatgttaaagccctaaccctcagtgccccagaatgtggctgtttttgagacaaggtctttcagaggtgattaaggtaaatgaggtcactagggtgggcccagatccagtatgactggtgtccttataagaacaggaggagaagacacacggggatgccaggggcctgcttgcccagagggacagccctgagacagggcagcaagagggtggagtctgcgtgtcctggaaggtgggtgggggagtgggggagaaagcagccttgggggcctggatcctggacctccagcctccagatggtgagaaatcaggtctgctgttgaaggcctcagggtgtgctatttcagtttagtggctcaagccaactaagaccaggggaaggggctggcagccagggaagacggctaagccaagatgtgggcgggaggggagcagcggcagggtcctggggctaggagcctgagctacatgccaggtgggaccacccgtcccaaagactcacggctgtgagcccctagcagcttacggttgcagtgggtgatgagtcctggggagagggatgggagtggagaccctaacagcacctgcccctccgcattggacgctcagccagcaagatcaatgcagaactcacggaacagccaaccaccaatcaccgatcagccaacaccctggcagaattatctcagcatctggatgttggcaccacagggacctcaggctgcagagaacaggctggcctatgaacggagacggtgcctgagctcgtggctgcagaggacaggccagcctgcgagtggagacggcacccgagctcgcggcaatgttgcggggaagccaagaccaacccctgcccgtgcccggtttccccgaggccccgtgtcctcagagcgcgtctcgtggttccgggctcactggcttctaagtcttctccttctgtccttctgtctcagtctcagccttcactcttccttctctcagggagaaaaataaacctctgtggctggcgtttgcaaaagggagagactcttcctgaggaaataaaatagatttcagtcaatgaatatgcaaacttgaggcaggccaacacccaggagtcagggctgggagacattggagcccagcagccccctggcccgacgcccacacaaagcccatttcagccaaaggtatcaggttgttcactgtgtaaacacacaccacacacacacacacacacacgataagcaaccattttggggggcaagtactgaaactcaaaacttgttagctttcaagacctgaattcagctgcaagaggcttatcctggcttttacattgcagcatggtttttaattttattttctacatttttttaaaatcaggcagcctccagaatcacagaagattcagagaaactcccaacagcatggtattttaaagcaggaaacaggtcttggcacttttttgacaccatggagtcctgagtgggtggtggccatcacgctgggtgcagacccgagagcagaacctggggtctgcagagaacctgagccggcacccagagtggcgggggaggccgtgccaggagagccagccttccatagagcttggagaggctggtgtcacaggggaaatgaaaacaggacttcaaagagggagcgggcagaagcccctgcaggggattttctggttcctaacctggaacaggcaccggttctgaggcacacagcacgcagcctctgccttcaccatgtgctgtccacacgtcccgagcccctggctgcccaaaagagagtcacctgcccggctaaacccacaccccaaccctccctgtcactggctgctgctgggggtccattcacctcaaccccatgcttagcagtgaccaccctgggctcttgtaatggatcctcatgtcagccactgtgtgagaacctttccccgcagtgttatcccagtcacatgaatcaggctctgagtgaacgcgtgtattccttgggtgcctacttagagcagaaggaaagcaaagatgctcaccgggtagccaggagcgccgcttccctgcccatgcgccatggtgtgtgtgtgtgagctcagggcacgcgggcacacacgtgtccgtggttcccacaggaggagcagggccctcctgaaacccaagagccacatccccaggagcctcgggcagatgagcgggaggtacctgggagctggagacagggccgcccctcgcgaggacgggcttttccgcctcacttctgccttagcggcattgataccacgcgcattcacctctccgtgcctcggttttctcacccataaagtgggggctcgctctgcctgcccagttgctgtcagattgggccaggcctgtacaagcccacatggggacccctgggtgactgcgctctcccacctcccctcccacccttcccgctgcgggactccacacaccaggcccaccgtcaccccctgctctcagtctccaggcacagccaggtgtgggcggtgcatggcgggcccagcggtcaaccgcggcaaaggtggttcccaggtccctgtgtagcgggggtcccgtagccccattgactgcaggtcttggctgggccaaggccatagagcagcatggccagcactcctgttccatcctctgcatctctgcttcaattgcaaacaacagccacagttcacatctggatctgtgtggtgcccttcagtttaaaacccctgcccagaggccatctcctttgaaacttcccaggcaggtgtcaaaacgatcctccctccacatgtcacagaaatgcagcagcaagaagcccgaggcctccaggaggagctgcgggctggccccacccacaagcagctgcgggctcacagtcacggtcctctgaggacaggcttgtgcttcccactccccggtgagcgggcaccacggatgtcagtgccgtgactggcctttgtgctttggataaactccatgtggaatggaaggaaagatgggagcattctagaacctgagcattttgtagcaagagcactgttctcaccgctgatttccaatgtccagggcagaaagatgaagagatatcgttttcccttaaatgggagtgaaggacagaggcagcgtggtggccggtgatggacagacccgtgtctgctggcaggacaccccggccgcctccgtctcatggatagagcaagcagttttctctatgacgtggcttctttaggaggcagctcggctgcccagatccctccttattttttagttctcaagccctgtagggtgttttcggtcgcagttgtttgggctgtggtcctgaccctcctgagttccagtggctctgttcaggagagctgcctggggccgggacttctgaaacacacactgagccacaggccggcccggcggcttgggttcaccgccgcctctttgtgtgtgatgtcctgggataggcccgtgcacgttcagatgacactgtacatataaataacttgtagccgagaacaggatggggcggggaggaggggagggcagaacgtaccacagcagcagaagtcactgtggatgccttcgtaagttgcatggaaggtttttaaacctagccctgccgagcagccctctcctggtccgggagaacgatggggagagagctggcgttcagctttcatcactggagccgttccttcttccggccccccgagggcctgtccatgatcacactttgtcttgtttcgggggtggcccctgtgaccccttagaggtgcaaatccaaggcagtagaagccgcctgccaggccagtgcccgccactgcttaattcaggcggaatcacggctcagagggttccctccactttccaagggaaacatgtccacggggtatctcttcctgcgtattttctcacgacccttccttacatccaaggccacgtctctcgacacgttgtcccccctctgccgtcacacatggcgtaatccgcgccccccctaccccccacatcagctgctcagcgagccgcactcacagtcacaggccccgccggcggcaaccccacctcctcccgcccaggcaggaaacgctcagcagcaccatctgcttggctcctcagccagccgcgctccgggagccctgggggcgaggcggccgtggcgtcctccacgtctgtgtctccccgcacgtcagccgccccacgctgtctctggaagcttccggagtacccaggccttctgcactccacgcactgcatgtgcgcctgagccgctgtctcgattttacaaaacggaatctagcagtccatgcactcagggaggcggctggcaggattttctggcaaactaagggtgttctttcctggccaaaggaaaagtcttttggaaaatgaataatctcttcctaatttgcttgactaggaagatgggtttttgcacagtgggtttgttgaagggaggcagctcttgaaattttgttcataatccgacatgacaagggtgaccgtataatctaccgacccatctgagccccttgagaagaaaggagaaggttgttaatacacgcactgggaccacaggcatcactgggcctgtcctgggcaaactgatttatgatggccgccgttgaccttcgctgtggtcagcctaagtgacctcagcgtgcacctgccatgatttcctggaatcactctctgggttccaggcttctaggcctgtggttttggggctggtttctctgaattctcagatcctggtcagaagtttgtgggcagattggtgtctgatgaatgagggccgctcattcaagaaaccagcgtagcaaatgggaggtggtgcagggtctctctgcgaagcgctcaagcccacttccctgcccccacgtgtcctgattttactttgaaatttccagtggatgcaatagtgccgaccatgtgcacatggggtcaggatctcaggcccgccagctggactacagcaagtacccatggtctcagggaaaaggtcccctgctgcaggctgtgggggacctcggctctcacagtggctatgcctgagaaagcccctccagactcgccaacctggcccgcgcgtcctgtccggagggcagggtggggctggtgctggttacagatgatcctcaagggcacagcacgcaagccaccaggcgcccctcctgcagctgggtcagagagaggcactgggagcctggctccctccaggtcagtctccaccagggccaccccggtgacctgcaggagaggaaggcagacgaggagtggccctgccccttagggcgcatcgtgcaggtggcacaagggggtcatctgcatcctggtcaagggggagcccacctgcctcctccaggtcgggaacactccctggaggccatggtgtggagcgtccacccgggcttcgtcctccagctcagctgctgggccctgggaagggacaggcccagcacccgttcagccgggctgagccgcaggcagagcgccttgcctgggagagacaaacccaccgctgaggacacaccctcaaggttcacccttccccacttctgtgttgcccttagctctaaggtgctaattccatctctagtttcaacaggctgattgctcttaagggaaaatggggttgcacaatccggctgtggtggccggggctcttggtctccccccagtaagaggatggactttccagccctgctgatggtcagcggggaccacgtggaggctttggcagatgaaatggggcacatgacatagccctgccccagtggaagcctcagagccatggctgggctccaccaggcttgctccagcggccatgaggaccatgccccacaggcaggggctgcacctccaccctggttccagaaggaagaggcacagccgacatgccgctcgagcaggaaaccctggggaaggtgggacatgagatcctgtgtctgatactacagtgtaaccggctagaaactgactcaaaggggcatttttacagcagaaagaggcgaagcacacgtgcatctgccatcctgtgattgtcaggccccgtttaggagtggacagctccatggttgtgtttgagccccacaccggccctggggggttatactgccctggaggacagctgacctcagttctccaagcttccattcccccttgtatgggcacagcaccccaaccttcttttggcagctcccacgccccccagtgctggtgggctctagggctctggtccctgatgctcagaggcacagagacagcattcctcaggggccctgatcctctggcccggttcagactgtggtggggcctcgggacctttccagaaccttggaagtgggtagcaccctttgctgggacagacatgcctggagctccgggcattgggccactgctgggataagcccacgacagaatgaagccgggcaggcagaaagagctgcgggctccctggccactcctgtttccgtaaagggcctggtgtctcatttcctacttaccttggactttaagggcctcctgcagcctttgtcacacactcttcttatttttttgtccattacaaccttttacggcggcacaagccattgttctcagggccaacgcgtgagtcctgtggtgagtttcctattagtgtggctcgagaaggtaccccgtgctgacgaagcctggagaggcagggccacactgcagagcctcaggccaagggtggcggtgctggggtctcatgagcccagggttcactgcccaccaggcggcattagcctgcggctttggcgcccagaagtcccgacaggcagcaaagtctcctgctcctggctgctggccaggagagcccagctgggcctcacctgatcgagaggaaacgcctgtgtcctctaatcagcatctcactgacagagtcacccctggtacagcaagtgggctttcaaggacatcaggtggctgcattcaggctggtaacaacaccgccctcagctctcacagtctgaggaagccccctgaaaagtcactggagtggggctgcaggaaccccacaaaggcctttcctgctcctgaataattcccaagcacctaggacttcccgggcctggcttctccgccagtccaacctccggacctgaagaccaagcagtgcccaagtgtgaggtccctggagaaggaggaggaagagtggaaggaggtggagggtaatgcatccagaggaagacgctgagggtcaggctggccctgggtctgacctgtccttggggtgagcaggctactgcactgtgggagtgggggggcccctaggcaattggccaagaggtaactgatgcagagagaggaatgctgaggccacggccattctgggccttcatggccatagctcgtgagcacccatgggtgccagcactgaggccagctgggctccagcattgggaagctcaaggaagaccagtcacgtttcccctgagtaagatgctgccctggggcttgtggggccacagacagacaccaaccctggcgctcttagggtcaggaggggtggcccagggtagcacagcgtggagagaccacgcggaggtgatgtcctcacagaccccgccccactcccccaggggccatcccacagagccttgcctttgttttttgttttttctattcctggcttttttcatttgctttcagatcaactgcttcattaaaaaacatccgcctaaactgtggagacagaggaaggatcagtgcttgccaagggctgggggaggaggaacaggcagagcgcagagggtttcagggcagtgccgctctgcgtgacgccatcacggagggtccaggtcatcacacgtctctccaaacccctagaatgcccaacactcactctgaagccttctgtcaatgtgggatcatctgtcgtaaagtctgcaccgctgtggtgggggcgtggatagtgggggaggctgtgcgtgtgtgggggcagggagtgtatgggaaatctctgtaccttccgctcaatttggctgcgaacctaaactgctctaaaaaaagtctatttttaaaaagcatatgcccgaaaagtccttgaaaatgcatctttccctaaatattcaaatttatgttcattaataaaatagcacatatttattctaatttttaaatcttcacaaatatcagtgattgcatgatttgttctcaaaaacacttttccaaactacatctagaagccacatttctgtggtcggctcgccagtggtgggcacgcgtcaggtcggatgggtagggcctggggtgaccctggctttctgccctctgagcacgacatggaggctggacttgtgcctctgcagcccctcgaagcactgccaccatcctgccgagggcccaaagccttgtctccacctgcgcgccttgagtgtcctcgctgggaaatgggcacagcagggcagcgaaggtgctggtgctgacgttccatgactgtgagagccgggaggcaccccatgcggagaccaggcacagatccccagatcactgaagggacgatcccccaacaggcagaaccagggtacggcccggggttctgactcctggggattcagggccctgggcctggtgccagctgggcacgtttctcagcccatcagaggacacaaagggcaaatggagcaggttgaattgtgtccccaaaatgatctgtcgaagcctgcaccccacaaccatgaatgcaaccttctctggaagtggagtcactgcaggtgtattaagatgtcagttaggatgaggtcaccctggagagaggtgggccctgattcggtgcgactggtgcctggtaagcggaggaaagacgcagagatgcgcagagggaagctgcgtgaaggcccaggaaggaaggcctgagaagctggaggcagaggctagagcgatgcctctgcaagccagagatgccaagggctgctggcaacagagaagccagaagaggcaaggaacagattcctccctgcagggagcacggctcgacacgccgcaccttgatcgcaggcgtctggcctccagccggagccgggacacgtttctgctgttgtaaatgaccccatttgtggccgtctgttgcagcagctgtggggaactggcaccgatctcagggccggaagcacagctgggcacggctctccccagctctctcggtcactgtcccctgtcacaaaccccgtgcaaaacagcctgagggggttccttgctgccctccagggctgtgtctgagtgctgagccagcccctggaggccagggcctcagagcacaggggagccacaggaaggggtgtctccacccggaattggagcaggagggccaaggccttccaggctgaggaagggaacaggatcagggcctcctcctctcaaggtggcccctgccagcggcccctggagctgcaaggctacagggacctggccccaggtggggctcctgtcacccccctgcacggaactcactctcacccccagcctttcctacccctcacaccaccaccctgcatcccaccccaaactgggtaaccccccagcaatcccccagggacacagagaggagtacctgggggatgactgggaggagtgctggggagaggagtgctggaggatgactgggggaggaacagggagaggagtgtctaggggatgactgggaggagagccgaggagaggagtgcatgggggatgactggggggaggttggccaggagcacctcagtggccgctcagaagtgctcagcttcactggtgcttgagcacttccagtgtgcccagaatgaggagcacatttacgaaggcagcaatagagatggtggcagccttcatcagagagatggggtcctgcccaggcctcataaggaggtgcgtgctggcagtgacaacggggacaagaggggcagagatgagacactgggatgcaaggattgcatttgagcccgatgaagaaggaactgttgagagtatcccacagttacagacccagagtgggggcatccccatggctcagggaaccccagcttcagagacacacacagcgtgcaagccacatgagcaggccgggatacccctccaccacgtgagcccagcagtcaccagggcattttggaaacagcgtggtcttggtcccgagctgcagatacacaagatgttcccaggggaaaactgagtgaaaggtacatggaatctctagatttttttttttgcaacctcctgtgaatatgtaattgttttaaaataaaaagttaatcagaccagtatggtcagtggtgtgaccatgtgtgtgtatgcatgtgtatgtgtgtgcgtgcatgtgtgtgtgtccgtgagtgcatgtgtgtgatgtgtctgtgcatgcgtgtgtgcatgtgtgtgcatgcatgtgtgtgatgtgtctacatgtgtgagaatgtgtgtgcatgtgtgtgatatgtgtgcacgtgcgcatgtgtgtgcattgtgtgatgtctgcatgtgtgtgcatgtgtgtgatgtgtctgcatgtgtgtgatgtgtctgtgcatgcatgtgtgcatgtgtgtgatgtgtctgcctgtgtgtgcatgcatgtgtgtgcgtgtgtgcatgtgtgtgtgcatgtgtgtgggctgatggcagaatttcaggagcatggctaatctgacccatttcaatcaagtccataaaaaaaaaaatgattctggaaagacacctctatggcaaaccacgaaaagacttggtgacagaaccactcagccatgacaccaggctcatcccaaggacagtggtgacccgtttccatttgtgccacttgatgtggatggaggcagcacagcgagacaagggctagacacacacgcatgtgagggacgggatgagtcatcggcacacgtccctgttaccgtcactgtcagcccagagctggagccctgtgaggcaagatgaggggcagatgagagctgagagcagaaggaaagaaccggacgccctggcagaaaacacagacctgggcgggagggcagggggagcgcaggggagaggcaggggctgcagggtcgaggcgtggaggaggctgtcaggaaaggctgctgtactttcttgaatgcagccccgctggccaagacacaggaaaagacagggttttattttaaaatgctctgtgtcagctggaatgggggtcttggatgaaacctgcggggactggacctcacagggcagccagcagtcggtgtcacagcagctccacaactgttgggataccaggttttcttggtgggcaaagtttacttttcgctccatctctcagagcacgagcccctctgacagggcagacaccgatgatctcagcacagccttggcactgcttggcacagctgcgtggggatcgtgcgtgaaactgcgacttgactttttccaaagccccaggattccccttgcgtgggagcctggtgctgtgccggtggtcaccagcctcactgcccgcccactccccaccctgtggcctctcagtgtcccctccagcacacaggacccggctcagttgctcagagagagatttttccagcaaggcgtttgcaggcggcctggccgtgcttctgacccaccggcaggtttctgaagagccgctgcaggctctttcttgcaggacatgaagccataattagtttttccttccttgccaaattgggagcctgcgggtctggtagcactgaggaaaatacagctcagtgtatggctgaagagtgagcccagggcacacgtgtgtgcacgtgcgtgagaaagagagaggagactgagaggcagggagcctcttctctgtggatctcacctgtctgtccacgccgcacgccccccggcagcaccactttcaacaccacttttcagagctaaaagagtcatctgttttgcttcagcaaaagaaacgtcagcctagaagctttaagcatattcccacaatgggctttaattatcagagaaggttggcaatacgtttgcattttaattaagattaatgaatcatgcatgattcatcaggccgttcccctccgttggcggagcagtgatgagaaggccaccatgtcgctgaggggccatctgcagggacggtgtgtcagatccgagaaccccactcagtggtccctcccctggggccccagcggcaatctgtcctcatacacgctgcagccacgcctcagccatgtgacctgggggtttctgcttctccagaaagggcgtactgggtgcaactacacacacacttaccctgtaggtgccaataaacgcaacgttaaacaacaagtctatgggtaagtaagtttgagaaatgccagtttacatgaaggtgagcagagttgtgtgtgtttccctgcaggactcctcaggcctttaatacgcacatgtgcgctgtgaacccccagattcatttgcacacagaagctatccttccagaaatcacctttgggattagtacagtattccctgtaaaccaaaaatagaattctaagccccccaactgcctgaatggctcccctactcttggccaaggggatcccaaaggaacctgataaacgagttcaggccaggatgggaagaggtagggttggacatgcctcataatactctcctccctctctggagtttaggcacagctgaccagcattaacatgaaaacagagatcataagactggcagaaaagactctttgtagcaataagacaccaaattccaccctgactctagtatagcatcacatgactgatagcaggcctggaaaaaaataaaagtactttaccccaaaatatatttctctgacatattttgaaatggccctgcaaagctgtctcttaagggggaaatttgcattctgtagagaattccctgcccttaataggtcttttacagagagtctgacacattttaaggtcccataagagacatttgccatctagtctctctgaagcctgctatctggaggcttcatctacataacaaaaaccttggcttccacgatccccttgtcttaactcaagcatctctttctgctgacctcaaactttttaggcaaagctcagctctttcaaccaattgccaatcaggaaatctttgaatccacctataacctggaagcctctcactttctgggtcacaccaatgtataccttacatgtattgattgatatctttgcctgcaacttctgtaccctaaaatgtatgaaagcaaagctgcaccccaaccaccttggacacatgttctcaggacctcttgagactgtgtcacaggccatggcccttaaccatagcaaaataagcctctacattgattgagacctgtctctgatattttttgggttacacctccaaaccaggaattggtgatccaggaaaacactccattgtggggtgatttgagtgggtgacagaagcccaggccagccctccaggaatggatgcacactggcaccagggatgcttgcatagagatggggttgggggtgtccttctgaacactcccacaacaaccgggcgccagcttgcatctttgcttgacgtggccgtcgcccggctggcctgtgagtgctgcatgggccacgcctgcatgtggcttgctcaccgtgggatccccaacacttctggaggtgcctggaccacagtgggtgtccccagacagccgcagaacacacaagggaatgtgcattcaaccctcatctcctaaggaggctgtggcccaccctgcttgggatggcaatggaggggccaagtgtatgaataaccccccaaaccattaaaacatcagcgtccctcaaacaacttcttgagatggggtgtgtgaggctcactacacgtaagaaacataatgaataaaacacaaaggccattacaacccacttaataattcagggactatgaagatagctggcgtctatgaattagaaaataagggaattcttctgggtgtggaggtaggggaagaggtttctgcgtattcattccgccccctgccatgtgggtatctattgcaccgggctggaggtctgggtctcagggcttggggagctgttcctgcacctctgcctgtccccaccaccaggcaacaaggtcagtgtggcccaccagggaaccacaccagggccagcagctccaggccccatctccctgaccccctggccagacctcgggagatgagagagacccaggcctagccagggcgggaggtggggaggggttgggggatcattcagggcacaaggggaggaggagagagcattctggggaacggggtctggggagggaaccaggacagagaggcatggtgacagctggaggtgagtctggcagggacccctcagaggacagcagtggtgtttacccccacagtgcgggcagcctgtggtgaatgacagcagtggggcttacacccacagtgcgggcagcctgtggtgaatgacagcagtggggcttacacccacagtgcgggcagcctgtggtgaatgagtgtgtctgggcctcccccgggggcttcggcacccgcttccctgtttcaccttgtctatctgagcatcggtaggaagatggcaatacctctgctgaatttcatcctctgaaaggcggaaaccaaaccctcagagccaggtgaagccaaaaagaagggacccctgacggctagaaagagcggccccagagccgcaccgtgggatgagccaatggcacgtcccggtcgccggccgggtgtggtgctgcccggagccacagagctgccagggcttgcacacgtctctggccatgacgcatgttttggtcaggaccaggcctggaatttggttctcactttactgagaaacctggcagcttctcaggccaccgcccaggtcacctgctcaccagcaacgtgaaccacaggaacggaggctgtgcgggaggcggctctgctctgtgctgggcccccctcctcctcactcaccctcttcagtcaaagaaaaaacgaaatggggccgcataagagtaatgcaaaagtcaacgtttctggattttcaagttttccagacagagctggaaacctgggtttcatgtcaactctcccacgtggtcaagagttgaagtcctggcctggccactcatcagcctgggacaagctccagacttgctcca
